(19) United States
(12) Patent Application Publication
(10) Pub. No.: US 2023/0032974 A1
(43) Pub. Date: Feb. 2, 2023

(54) SMALL RIBOSOMAL PROTEIN SUBUNIT 25 (RPS25) iRNA AGENT COMPOSITIONS AND METHODS OF USE THEREOF

(71) Applicant: Alnylam Pharmaceuticals, Inc., Cambridge, MA (US)

(72) Inventors: Bret Lee Bostwick, Cambridge, MA (US); Mangala Meenakshi Soundarapandian, Cambridge, MA (US); James D. McIninch, Burlington, MA (US); Gregory Hinkle, Plymouth, MA (US)

(21) Appl. No.: 17/668,413

(22) Filed: Feb. 10, 2022

Related U.S. Application Data
(63) Continuation of application No. PCT/US2020/046055, filed on Aug. 13, 2020.
(60) Provisional application No. 62/958,336, filed on Jan. 8, 2020.
(60) Provisional application No. 62/886,072, filed on Aug. 13, 2019.

(51) Int. Cl. C12N 15/113; A61P 21/00

(52) U.S. Cl. CPC C12N 15/113; A61P 21/00; C12N 2310/321; C12N 2310/31; C12N 2310/3233; C12N 2310/3515; C12N 2310/11

(57) ABSTRACT

The disclosure relates to double stranded ribonucleic acid (dsRNAi) agents and compositions targeting an RPS25 gene, as well as methods of inhibiting expression of an RPS25 gene and methods of treating subjects having an RPS25-associated disease or disorder, such as a nucleotide repeat expansion disorder, e.g., c9orf72 amyotrophic lateral sclerosis (ALS)/frontotemporal demential (FTD) and Huntington-Like Syndrome Due To C9orf72 Expansions, using such dsRNAi agents and compositions.

### RELATED APPLICATIONS

[0001] This application is a 35 § U.S.C. 111(a) continuation application which claims the benefit of priority to PCT/US2020/046055, filed on Aug. 13, 2020, which claims the benefit of priority to U.S. Provisional Application No. 62/886,072, filed on Aug. 13, 2019, and U.S. Provisional Application No. 62/958,336, filed on Jan. 8, 2020. The entire contents of each of the foregoing applications are incorporated herein by reference.

### SEQUENCE LISTING

[0002] The instant application contains a Sequence Listing which has been submitted electronically in ASCII format and is hereby incorporated by reference in its entirety. Said ASCII copy, created on Feb. 2, 2022, is named 121301_09803_SL.txt and is 805,258 bytes in size.

### BACKGROUND OF THE INVENTION

[0003] Nucleotide-repeat expansions underlie a heterogeneous group of primarily neurological diseases that in aggregate impact a large number of patients. Repeats can cause problems through a variety of mechanisms delineated over the past 25 years. For example, expansion of trinucleotide repeats within protein-coding open reading frames (ORFs) cause a gain-of-function toxicity downstream of the production of polyglutamine or (less frequently) polyalanine proteins. This toxicity results from both alterations in the native functions of the protein in which the repeat resides as well as toxicity independent of protein context, related to perturbations in neuronal proteostasis. Repeat expansions located outside of known protein-coding ORFs can elicit changes in the expression of the gene in which they reside, leading to reduced or enhanced expression at the transcript and protein level. Such non-coding repeats can also elicit toxicity as RNA by binding to and sequestering specific RNA-binding proteins via presentation of a repetitive motif.

[0004] Repeat-associated non-AUG (RAN)-initiated translation is a non-canonical translational initiation process which enables protein elongation through a repeat strand in the absence of an AUG initiation codon and in multiple reading frames, producing multiple homopolymeric or dipeptide repeat-containing proteins. Originally described in association with CAG-repeat expansions causative for spinocerebellar ataxia type 8 (SCA8), this process also occurs in association with expansions of CAG, CUG, GGGGCC, GGCCCC, and CGG repeats. Repeats can drive RAN translation in a surprising variety of RNA contexts, including within 5′ untranslated regions (UTRs), protein-coding ORFs, or introns and “non-coding” RNAs.

[0005] A small ribosomal subunit, RPS25, has recently been identified as a driver of RAN translation of a GGGGCC expansion, a nucleotide repeat expanded in C9 for72 amyotrophic lateral sclerosis (ALS)/frontotemporal dementia (FTD), in yeast. Knocking down RPS25 was shown to limit poly-dipeptide production and boost yeast survival without affecting global RNA translation. Knocking down homologs in fruit flies reduced neurodegeneration and in cultured human motor neurons, reduced neurodegeneration. (Yamada, et al. (2019) Nat Neurosci (doi.org/10.1038/s41593-019-0455-7).

[0006] There are currently no disease modifying treatments for nucleotide repeat expansion diseases, such as C9orf72 ALS/FTD and Huntington's disease, e.g., Huntington Disease, e.g., Huntington-Like Syndrome Due To C9orf72 Expansions and, therefore, supportive and symptomatic management is the mainstay of treatment. Accordingly, there is a need in the art for compositions and use of such compositions for the treatment of subjects having nucleotide repeat expansion diseases, such as C9orf72 ALS/FTD and Huntington Disease, e.g., Huntington-Like Syndrome Due To C9orf72 Expansions.

### BRIEF SUMMARY OF THE INVENTION

[0007] The present disclosure provides RNAi agent compositions which effect the RNA-induced silencing complex (RISC)-mediated cleavage of RNA transcripts of a small ribosomal protein subunit 25 (RPS25) gene. The RPS25 gene may be within a cell, e.g., a cell within a subject, such as a human. The present disclosure also provides methods of using the RNAi agent compositions of the disclosure for inhibiting the expression of an RPS25 gene or for treating a subject who would benefit from inhibiting or reducing the expression of an RPS25 gene, e.g., a subject suffering or prone to suffering from an RPS25-associated disease.

[0008] Accordingly, in one aspect, the instant disclosure provides a double stranded ribonucleic acid (RNAi) agent for inhibiting expression of a small ribosomal protein subunit 25 (RPS25) gene, where the RNAi agent includes a sense strand and an antisense strand, and where the antisense strand includes a region of complementarity which includes at least 15 contiguous nucleotides differing by no more than 3 nucleotides (i.e., differing by 3, 2, 1, or 0 nucleotides) from any one of the antisense sequences listed in any one of Tables 2-14. In certain embodiments, the antisense strand includes a region of complementarity which includes at least 15 contiguous nucleotides of any one of the antisense sequences listed in any one of Tables 2-14. In certain embodiments, the antisense strand includes a region of complementarity which includes at least 19 contiguous nucleotides differing by no more than 3 nucleotides (i.e., differing by 3, 2, 1, or 0 nucleotides) from any one of the antisense sequences listed in any one of Tables 2-14. In certain embodiments, the antisense strand includes a region of complementarity which includes at least 19 contiguous nucleotides of any one of the antisense sequences listed in any one of Tables 2-14. In certain embodiments, thymine-to-uracil or uracil-to-thymine differences between aligned (compared) sequences are not counted as nucleotides that differ between the aligned (compared) sequences.

[0009] Another aspect of the instant disclosure provides a double stranded RNAi agent for inhibiting expression of a small ribosomal protein subunit 25 (RPS25) gene, where the dsRNA agent includes a sense strand and an antisense strand, where the sense strand includes at least 15 contiguous nucleotides differing by no more than 3 nucleotides (i.e., differing by 3, 2, 1, or 0 nucleotides) from any one of the sense strand sequences presented in Tables 2-14; and where the antisense strand includes at least 15 contiguous nucleotides differing by no more than 3 nucleotides from any one of antisense strand nucleotide sequences presented in Tables 2-14. In certain embodiments, the sense strand includes at least 15 contiguous nucleotides of any one of the sense strand sequences presented in Tables 2-14; and where the antisense strand includes at least 15 contiguous nucleotides of any one of antisense strand nucleotide sequences presented in Tables 2-14. In certain embodiments, the sense strand includes at least 19 contiguous nucleotides of any one of the sense strand sequences presented in Tables 2-14; and where the antisense strand includes at least 19 contiguous nucleotides of any one of antisense strand nucleotide sequences presented in Tables 2-14 (i.e., differing by 3, 2, 1, or 0 nucleotides) from any one of antisense strand nucleotide sequences presented in Tables 2-14.

[0010] An additional aspect of the disclosure provides a double stranded RNAi agent for inhibiting expression of a small ribosomal protein subunit 25 (RPS25) gene, where the dsRNA agent includes a sense strand and an antisense strand, where the sense strand includes at least 15 contiguous nucleotides differing by no more than 3 nucleotides (i.e., differing by 3, 2, 1, or 0 nucleotides) from any one of the nucleotide sequences of SEQ ID NOs: 1, 3, 5, 7, and 9, where a substitution of a uracil for any thymine of SEQ ID NOs: 1, 3, 5, 7, and 9 (when comparing aligned sequences) does not count as a difference that contributes to the differing by no more than 3 nucleotides (i.e., differing by 3, 2, 1, or 0 nucleotides) from any one of the nucleotide sequences of SEQ ID NOs: 1, 3, 5, 7, and 9; and where the antisense strand includes at least 15 contiguous nucleotides differing by no more than 3 nucleotides from any one of the nucleotide sequences of SEQ ID NOs: 2, 4, 6, 8, and 10, where a substitution of a uracil for any thymine of SEQ ID NOs: 2, 4, 6, 8, and 10, (when comparing aligned sequences) does not count as a difference that contributes to the differing by no more than 3 nucleotides from any one of the nucleotide sequences of SEQ ID NOs: 2, 4, 6, 8, and 10, where at least one of the sense strand and the antisense strand includes one or more lipophilic moieties conjugated to one or more internal nucleotide positions, optionally via a linker or carrier.

[0011] In one embodiment, the double stranded RNAi agent targeted to RPS25 sense strand includes at least 15 contiguous nucleotides differing by no more than 3 nucleotides (i.e., differing by 3, 2, 1, or 0 nucleotides) from the nucleotide sequence of the sense strand nucleotide sequence of a duplex in Tables 2-14.

[0012] In one embodiment, the double stranded RNAi agent targeted to RPS25 antisense strand includes at least 15 contiguous nucleotides differing by no more than 3 nucleotides (i.e., differing by 3, 2, 1, or 0 nucleotides) from the antisense nucleotide sequence of duplex in one of Tables 2-14.

[0013] Optionally, the double stranded RNAi agent includes at least one modified nucleotide.

[0014] In certain embodiments, the lipophilicity of the lipophilic moiety, measured by logK_{ow}, exceeds 0.

[0015] In some embodiments, the hydrophobicity of the double-stranded RNAi agent, measured by the unbound fraction in a plasma protein binding assay of the double-stranded RNAi agent, exceeds 0.2. In a related embodiment, the plasma protein binding assay is an electrophoretic mobility shift assay using human serum albumin protein.

[0016] In certain embodiments, all of the nucleotides of the sense strand are modified nucleotides.

[0017] In some embodiments, substantially all of the nucleotides of the antisense strand are modified nucleotides. Optionally, all of the nucleotides of the sense strand are modified nucleotides.

[0018] In certain embodiments, all of the nucleotides of the antisense strand are modified nucleotides. Optionally, all of the nucleotides of the sense strand and all of the nucleotides of the antisense strand are modified nucleotides.

[0019] In one embodiment, at least one of the modified nucleotides is a deoxy-nucleotide, a 3′-terminal deoxy-thymine (dT) nucleotide, a 2′-O-methyl modified nucleotide, a 2′-fluoro modified nucleotide, a 2′-deoxy-modified nucleotide, a locked nucleotide, an unlocked nucleotide, a conformationally restricted nucleotide, a constrained ethyl nucleotide, an abasic nucleotide, a 2′-amino-modified nucleotide, a 2′-O-allyl-modified nucleotide, 2′-C-alkyl-modified nucleotide, 2′-hydroxly-modified nucleotide, a 2′-methoxyethyl modified nucleotide, a 2′-O-alkyl-modified nucleotide, a morpholino nucleotide, a phosphoramidate, a non-natural base comprising nucleotide, a tetrahydropyran modified nucleotide, a 1,5-anhydrohexitol modified nucleotide, a cyclohexenyl modified nucleotide, a nucleotide comprising a 5′-phosphorothioate group, a nucleotide comprising a 5′-methylphosphonate group, a nucleotide comprising a 5′ phosphate or 5′ phosphate mimic, a nucleotide comprising vinyl phosphonate, a nucleotide comprising adenosine-glycol nucleic acid (GNA), a nucleotide comprising thymidine-glycol nucleic acid (GNA) S-Isomer, a nucleotide comprising 2-hydroxymethyl-tetrahydrofurane-5-phosphate, a nucleotide comprising 2′-deoxythymidine-3′ phosphate, a nucleotide comprising 2′-deoxyguanosine-3′-phosphate, or a terminal nucleotide linked to a cholesteryl derivative or a dodecanoic acid bisdecylamide group.

[0020] In a related embodiment, the modified nucleotide is a 2′-deoxy-2′-fluoro modified nucleotide, a 2′-deoxy-modified nucleotide, 3′-terminal deoxy-thymine nucleotides (dT), a locked nucleotide, an abasic nucleotide, a 2′-amino-modified nucleotide, a 2′-alkyl-modified nucleotide, a morpholino nucleotide, a phosphoramidate, or a non-natural base comprising nucleotide.

[0021] In one embodiment, the modified nucleotide includes a short sequence of 3′-terminal deoxy-thymine nucleotides (dT).

[0022] In another embodiment, the modifications on the nucleotides are 2′-O-methyl, 2′ fluoro and GNA modifications.

[0023] In an additional embodiment, the double stranded RNAi agent includes at least one phosphorothioate internucleotide linkage. Optionally, the double stranded RNAi agent includes 6-8 phosphorothioate internucleotide linkages.

[0024] In certain embodiments, the region of complementarity is at least 17 nucleotides in length. Optionally, the region of complementarity is 19-23 nucleotides in length. Optionally, the region of complementarity is 19 nucleotides in length.

[0025] In one embodiment, each strand is no more than 30 nucleotides in length.

[0026] In another embodiment, at least one strand includes a 3′ overhang of at least 1 nucleotide. Optionally, at least one strand includes a 3′ overhang of at least 2 nucleotides.

[0027] In certain embodiments, the double stranded RNAi agent further includes a lipophilic ligand, e.g., a C16 ligand, conjugated to the 3′ end of the sense strand through a monovalent or branched bivalent or trivalent linker.

[0028] In one embodiment, the ligand is

[chemical structure]

where B is a nucleotide base or a nucleotide base analog, optionally where B is adenine, guanine, cytosine, thymine or uracil.

[0029] In another embodiment, the region of complementarity to RPS25 includes any one of the antisense sequences in any one of Tables 2-14.

[0030] In an additional embodiment, the region of complementarity to RPS25 is that of any one of the antisense sequences in any one of Tables 2-14. In some embodiments, the internal nucleotide positions include all positions except the terminal two positions from each end of the strand.

[0031] In a related embodiment, the internal positions include all positions except terminal three positions from each end of the strand. Optionally, the internal positions exclude the cleavage site region of the sense strand.

[0032] In some embodiments, the internal positions exclude positions 9-12, counting from the 5′-end of the sense strand. In certain embodiments, the sense strand is 21 nucleotides in length.

[0033] In other embodiments, the internal positions exclude positions 11-13, counting from the 3′-end of the sense strand. Optionally, the internal positions exclude the cleavage site region of the antisense strand. In certain embodiments, the sense strand is 21 nucleotides in length.

[0034] In some embodiments, the internal positions exclude positions 12-14, counting from the 5′-end of the antisense strand. In certain embodiments, the antisense strand is 23 nucleotides in length.

[0035] In another embodiment, the internal positions excluding positions 11-13 on the sense strand, counting from the 3′-end, and positions 12-14 on the antisense strand, counting from the 5′-end. In certain embodiments, the sense strand is 21 nucleotides in length and the antisense strand is 23 nucleotides in length.

[0036] In an additional embodiment, one or more lipophilic moieties are conjugated to one or more of the following internal positions: positions 4-8 and 13-18 on the sense strand, and positions 6-10 and 15-18 on the antisense strand, counting from the 5′ end of each strand. Optionally, one or more lipophilic moieties are conjugated to one or more of the following internal positions: positions 5, 6, 7, 15, and 17 on the sense strand, and positions 15 and 17 on the antisense strand, counting from the 5′-end of each strand. In certain embodiments, the sense strand is 21 nucleotides in length and the antisense strand is 23 nucleotides in length.

[0037] In certain embodiments, the lipophilic moiety is an aliphatic, alicyclic, or polyalicyclic compound. Optionally, the lipophilic moiety is lipid, cholesterol, retinoic acid, cholic acid, adamantane acetic acid, 1-pyrene butyric acid, dihydrotestosterone, 1,3-bis-O(hexadecyl)glycerol, geranyloxyhexyanol, hexadecylglycerol, borneol, menthol, 1,3-propanediol, heptadecyl group, palmitic acid, myristic acid, O3-(oleoyl)lithocholic acid, O3-(oleoyl)cholenic acid, dimethoxytrityl, or phenoxazine.

[0038] In some embodiments, the lipophilic moiety contains a saturated or unsaturated C₄-C₃₀ hydrocarbon chain, and an optional functional group selected that is hydroxyl, amine, carboxylic acid, sulfonate, phosphate, thiol, azide, or alkyne.

[0039] In certain embodiments, the lipophilic moiety contains a saturated or unsaturated C₆-C₁₈ hydrocarbon chain. Optionally, the lipophilic moiety contains a saturated or unsaturated C₁₆ hydrocarbon chain. In a related embodiment, the lipophilic moiety is conjugated via a carrier that replaces one or more nucleotide(s) in the internal position(s). In certain embodiments, the carrier is a cyclic group that is pyrrolidinyl, pyrazolinyl, pyrazolidinyl, imidazolinyl, imidazolidinyl, piperidinyl, piperazinyl, [1,3]dioxolanyl, oxazolidinyl, isoxazolidinyl, morpholinyl, thiazolidinyl, isothiazolidinyl, quinoxalinyl, pyridazinonyl, tetrahydrofuranyl, or decalinyl; or is an acyclic moiety based on a serinol backbone or a diethanolamine backbone.

[0040] In some embodiments, the lipophilic moiety is conjugated to the double-stranded RNAi agent via a linker containing an ether, thioether, urea, carbonate, amine, amide, maleimide-thioether, disulfide, phosphodiester, sulfonamide linkage, a product of a click reaction, or carbamate.

[0041] In one embodiment, the lipophilic moiety is conjugated to a nucleobase, sugar moiety, or internucleosidic linkage.

[0042] In another embodiment, the double-stranded RNAi agent further includes a phosphate or phosphate mimic at the 5′-end of the antisense strand. Optionally, the phosphate mimic is a 5′-vinyl phosphonate (VP).

[0043] In certain embodiments, the double-stranded RNAi agent further includes a targeting ligand that targets a receptor which mediates delivery to a CNS tissue, e.g., a hydrophilic ligand. In certain embodiments, the targeting ligand is a C16 ligand.

[0044] In some embodiments, the double-stranded RNAi agent further includes a targeting ligand that targets a brain tissue, e.g., striatum.

[0045] In one embodiment, the lipophilic moeity or targeting ligand is conjugated via a bio-cleavable linker that is DNA, RNA, disulfide, amide, functionalized monosaccharides or oligosaccharides of galactosamine, glucosamine, glucose, galactose, mannose, or a combination thereof.

[0046] In a related embodiment, the 3′ end of the sense strand is protected via an end cap which is a cyclic group having an amine, the cyclic group being pyrrolidinyl, pyrazolinyl, pyrazolidinyl, imidazolinyl, imidazolidinyl, piperidinyl, piperazinyl, [1,3]dioxolanyl, oxazolidinyl, isoxazolidinyl, morpholinyl, thiazolidinyl, isothiazolidinyl, quinoxalinyl, pyridazinonyl, tetrahydrofuranyl, or decalinyl.

[0047] In one embodiment, the RNAi agent includes at least one modified nucleotide that is a 2′-O-methyl modified nucleotide, a 2′-fluoro modified nucleotide, a nucleotide that includes a glycol nucleic acid (GNA) or a nucleotide that includes a vinyl phosphonate. Optionally, the RNAi agent includes at least one of each of the following modifications: 2′-O-methyl modified nucleotide, a 2′-fluoro modified nucleotide, a nucleotide comprising a glycol nucleic acid (GNA) and a nucleotide comprising vinyl phosphonate.

[0048] In another embodiment, the RNAi agent includes a pattern of modified nucleotides as provided below in Tables 2-14 where locations of 2′-C16, 2′-O-methyl, GNA, phosphorothioate and 2′-fluoro modifications, irrespective of the individual nucleotide base sequences of the displayed RNAi agents.

[0049] Another aspect of the instant disclosure provides a double stranded RNAi agent for inhibiting expression of an RPS25 gene, where the double stranded RNAi agent includes a sense strand complementary to an antisense strand, where the antisense strand includes a region complementary to part of an mRNA encoding RPS25, where each strand is about 14 to about 30 nucleotides in length, where the double stranded RNAi agent is represented by formula (III):

sense: 5′nₚ-Nₐ-(X X X)ᵢ-N_{b}-Y Y Y-N_{b}-(Z Z Z)ⱼ-Nₐ-n_{q}3′

antisense: 3′nₚ′-N_{a′}-(X′X′X′)ₖ-N_{b′}-Y′Y′Y′-N_{b′}-(Z′Z′Z′)ₗ-N_{a′}-n_{q′}5′ (III)

[0050] where:

[0051] j, k, and 1 are each independently 0 or 1;

[0052] p, p′, q, and q′ are each independently 0-6;

[0053] each Nₐ and Nₐ′ independently represents an oligonucleotide sequence including 0-25 nucleotides which are either modified or unmodified or combinations thereof, each sequence including at least two differently modified nucleotides;

[0054] each N_{b} and N_{b}′ independently represents an oligonucleotide sequence including 0-10 nucleotides which are either modified or unmodified or combinations thereof;

[0055] each nₚ, nₚ′, n_{q}, and n_{q}′, each of which may or may not be present, independently represents an overhang nucleotide;

[0056] XXX, YYY, ZZZ, X′X′X′, Y′Y′Y′, and Z′Z′Z′ each independently represent one motif of three identical modifications on three consecutive nucleotides;

modifications on N_{b} differ from the modification on Y and modifications on N_{b}′ differ from the modification on Y′; and

[0057] where the sense strand is conjugated to at least one ligand.

[0058] In one embodiment, i is 0; j is 0; i is 1; j is 1; both i and j are 0; or both i and j are 1.
[0059] In another embodiment, k is 0; 1 is 0; k is 1; 1 is 1; both k and 1 are 0; or both k andl are 1.
[0060] In certain embodiments, XXX is complementary to X′X′X′, YYY is complementary to Y′Y′Y′, and ZZZ is complementary to Z′Z′Z′.
   In another embodiment, the YYY motif occurs at or near the cleavage site of the sense strand.
[0061] In an additional embodiment, the Y′Y′Y′ motif occurs at the 11, 12 and 13 positions of the antisense strand from the 5′-end. Optionally, the Y′ is 2′-O-methyl.

[0062] In some embodiments, formula (III) is represented by formula (IIa):

sense: 5′nₚ-Nₐ-Y Y Y-Nₐ-n_{q}3′

antisense: 3′n_{p′}-N_{a′}-Y′Y′Y′-N_{a′}-n_{q′}5′ (IIIa).

[0063] In another embodiment, formula (III) is represented by formula (IIIb):

sense: 5′nₚ-Nₐ-Y Y Y-N_{b}-Z Z Z-Nₐ-n_{q}3′

antisense: 3′n_{p′}-N_{a′}-Y′Y′Y′-N_{b′}-Z′Z′Z′-N_{a′}-n_{q′}5′ (IIIb)

[0064] where each N_{b} and N_{b}′ independently represents an oligonucleotide sequence including 1-5 modified nucleotides.

[0065] In an additional embodiment, formula (III) is represented by formula (IIIc):

sense: 5′nₚ-Nₐ-X X X-N_{b}-Y Y Y-Nₐ-n_{q}3′

antisense: 3′n_{p′}-N_{a′}-X′X′X′-N_{b′}-Y′Y′Y′-N_{a′}-n_{q′}5′ (IIIc)

[0066] where each N_{b} and N_{b}′ independently represents an oligonucleotide sequence including 1-5 modified nucleotides.

[0067] In certain embodiments, formula (III) is represented by formula (IIId):

sense: 5′nₚ-Nₐ-X X X-N_{b}-Y Y Y-N_{b}-Z Z Z-Nₐ-n_{q}3′

antisense: 3′n_{p′}-N_{a′}-X′X′X′-N_{b′}-Y′Y′Y′-N_{b′}-Z′Z′Z′-N_{a′}-n_{q′}5′ (IIId)

[0068] where each N_{b} and N_{b}′ independently represents an oligonucleotide sequence including 1-5 modified nucleotides and each Nₐ and Nₐ′ independently represents an oligonucleotide sequence including 2-10 modified nucleotides.

[0069] In another embodiment, the double stranded region is 15-30 nucleotide pairs in length. Optionally, the double stranded region is 17-23 nucleotide pairs in length.

[0070] In certain embodiments, the double stranded region is 17-25 nucleotide pairs in length. Optionally, the double stranded region is 23-27 nucleotide pairs in length.

[0071] In some embodiments, the double stranded region is 19-21 nucleotide pairs in length. Optionally, the double stranded region is 21-23 nucleotide pairs in length.

[0072] In certain embodiments, each strand has 15-30 nucleotides. Optionally, each strand has 19-30 nucleotides. Optionally, each strand has 19-23 nucleotides.

[0073] In certain embodiments, the double stranded region is 19-21 nucleotide pairs in length and each strand has 19-23 nucleotides.

[0074] In another embodiment, the modifications on the nucleotides of the RNAi agent are LNA, glycol nucleic acid (GNA), HNA, CeNA, 2′-methoxyethyl, 2′-O-alkyl, 2′-O-allyl, 2′-C— allyl, 2′-fluoro, 2′-deoxy or 2′-hydroxyl, and combinations thereof. Optionally, the modifications on nucleotides include 2′-O-methyl, 2′-fluoro or GNA, and combinations thereof. In a related embodiment, the modifications on the nucleotides are 2′-O-methyl or 2′-fluoro modifications.

[0075] In one embodiment the RNAi agent includes a ligand that is or includes one or more lipophilic, e.g., C16, moieties attached through a bivalent or trivalent branched linker.

[0076] In certain embodiments, the ligand is attached to the 3′ end of the sense strand.

[0077] In some embodiments, the RNAi agent further includes at least one phosphorothioate or methylphosphonate internucleotide linkage. In a related embodiment, the phosphorothioate or methylphosphonate internucleotide linkage is at the 3′-terminus of one strand. Optionally, the strand is the antisense strand. In another embodiment, the strand is the sense strand. In a related embodiment, the phosphorothioate or methylphosphonate internucleotide linkage is at the 5′-terminus of one strand. Optionally, the strand is the antisense strand. In another embodiment, the strand is the sense strand.

[0078] In another embodiment, the phosphorothioate or methylphosphonate internucleotide linkage is at the both the 5′- and 3′-terminus of one strand. Optionally, the strand is the antisense strand. In another embodiment, the strand is the sense strand.

[0079] In an additional embodiment, the base pair at the 1 position of the 5′-end of the antisense strand of the RNAi agent duplex is an A:U base pair.

[0080] In certain embodiments, the Y nucleotides contain a 2′-fluoro modification.

[0081] In some embodiments, the Y′ nucleotides contain a 2′-O-methyl modification.

[0082] In certain embodiments, p′>0. Optionally, p′=2.

[0083] In some embodiments, q′=0, p=0, q=0, and p′ overhang nucleotides are complementary to the target mRNA.

[0084] In certain embodiments, q′=0, p=0, q=0, and p′ overhang nucleotides are non-complementary to the target mRNA.

[0085] In one embodiment, the sense strand of the RNAi agent has a total of 21 nucleotides and the antisense strand has a total of 23 nucleotides.

[0086] In another embodiment, at least one nₚ′ is linked to a neighboring nucleotide via a phosphorothioate linkage. Optionally, all nₚ′ are linked to neighboring nucleotides via phosphorothioate linkages.

[0087] In certain embodiments, the RPS25 RNAi agent of the instant disclosure is one of those listed in Tables 2-14. In some embodiments, all of the nucleotides of the sense strand and all of the nucleotides of the antisense strand include a modification.

[0088] Another aspect of the instant disclosure provides a double stranded RNAi agent for inhibiting expression of an RPS25 gene in a cell, where the double stranded RNAi agent includes a sense strand complementary to an antisense strand, where the antisense strand includes a region complementary to part of an mRNA encoding an RPS25 gene, where each strand is about 14 to about 30 nucleotides in length, where the double stranded RNAi agent is represented by formula (III):

sense: 5′nₚNₐ-(X X X)ᵢ-N_{b}-Y Y Y-N_{b}-(Z Z Z)ⱼ-Nₐ-n_{q}3′

antisense: 3′n_{p′}-N_{a′}-(X′X′X′)ₖ-N_{b′}-Y′Y′Y′-N_{b′}-(Z′Z′Z′)ₗ-N_{a′}-n_{q′}5′ (III)

[0089] where:

[0090] j, k, and 1 are each independently 0 or 1;

[0091] p, p′, q, and q′ are each independently 0-6;

[0092] each Nₐ and Nₐ′ independently represents an oligonucleotide sequence including 0-25 nucleotides which are either modified or unmodified or combinations thereof, each sequence including at least two differently modified nucleotides;

[0093] each N_{b} and N_{b}′ independently represents an oligonucleotide sequence including 0-10 nucleotides which are either modified or unmodified or combinations thereof;

[0094] each nₚ, nₚ′, n_{q}, and n_{q}′, each of which may or may not be present independently represents an overhang nucleotide;

[0095] XXX, YYY, ZZZ, X′X′X′, Y′Y′Y′, and Z′Z′Z′ each independently represent one motif of three identical modifications on three consecutive nucleotides, and where the modifications are 2′-O-methyl or 2′-fluoro modifications;

[0096] modifications on N_{b} differ from the modification on Y and modifications on N_{b}′ differ from the modification on Y′; and

[0097] where the sense strand is conjugated to at least one ligand.

[0098] An additional aspect of the instant disclosure provides a double stranded RNAi agent for inhibiting expression of an RPS25 gene in a cell, where the double stranded RNAi agent includes a sense strand complementary to an antisense strand, where the antisense strand includes a region complementary to part of an mRNA encoding RPS25, where each strand is about 14 to about 30 nucleotides in length, where the double stranded RNAi agent is represented by formula (III):

sense: 5′nₚ-Nₐ-(X X X)ᵢ-N_{b}-Y Y Y-N_{b}-(Z Z Z)ⱼ-Nₐ-n_{q}3′

antisense: 3′n_{p′}-N_{a′}-(X′X′X′)ₖ-N_{b′}-Y′Y′Y′-N_{b′}-(Z′Z′Z′)ₗ-N_{a′}-n_{q′}5′ (III)

[0099] where:

[0100] j, k, and 1 are each independently 0 or 1;

[0101] each nₚ, n_{q}, and n_{q}′, each of which may or may not be present, independently represents an overhang nucleotide;

[0102] p, q, and q′ are each independently 0-6;

[0103] n_{p′}>0 and at least one nₚ′ is linked to a neighboring nucleotide via a phosphorothioate linkage;

[0104] each Nₐ and Nₐ′ independently represents an oligonucleotide sequence including 0-25 nucleotides which are either modified or unmodified or combinations thereof, each sequence including at least two differently modified nucleotides;

[0105] each N_{b} and N_{b}′ independently represents an oligonucleotide sequence including 0-10 nucleotides which are either modified or unmodified or combinations thereof;

[0106] XXX, YYY, ZZZ, X′X′X′, Y′Y′Y′, and Z′Z′Z′ each independently represent one motif of three identical modifications on three consecutive nucleotides, and where the modifications are 2′40-methyl, glycol nucleic acid (GNA) or 2′-fluoro modifications;

[0107] modifications on N_{b} differ from the modification on Y and modifications on N_{b}′ differ from the modification on Y′; and

[0108] where the sense strand is conjugated to at least one ligand.

[0109] Another aspect of the instant disclosure provides a double stranded RNAi agent for inhibiting expression of an RPS25 gene in a cell, where the double stranded RNAi agent includes a sense strand complementary to an antisense strand, where the antisense strand includes a region complementary to part of an mRNA encoding RPS25 (SEQ ID NO: 1), where each strand is about 14 to about 30 nucleotides in length, where the double stranded RNAi agent is represented by formula (III):

sense: 5′nₚ-Nₐ-(X X X)ᵢ-N_{b}-Y Y Y-N_{b}-(Z Z Z)ⱼ-Nₐ-n_{q}3′

antisense: 3′nₚ′-N_{a′}-(X′X′X′)ₖ-N_{b′}-Y′Y′Y′-N_{b′}-(Z′Z′Z′)ₗ-N_{a′}-n_{q′}5′ (III)

[0110] where:

[0111] j, k, and 1 are each independently 0 or 1;

[0112] each nₚ, n_{q}, and n_{q}′, each of which may or may not be present, independently represents an overhang nucleotide;

[0113] p, q, and q′ are each independently 0-6;

[0114] n_{p′}>0 and at least one nₚ′ is linked to a neighboring nucleotide via a phosphorothioate linkage;

[0115] each Nₐ and Nₐ′ independently represents an oligonucleotide sequence including 0-25 nucleotides which are either modified or unmodified or combinations thereof, each sequence including at least two differently modified nucleotides;

[0116] each N_{b} and N_{b}′ independently represents an oligonucleotide sequence including 0-10 nucleotides which are either modified or unmodified or combinations thereof;

[0117] XXX, YYY, ZZZ, X′X′X′, Y′Y′Y′, and Z′Z′Z′ each independently represent one motif of three identical modifications on three consecutive nucleotides, and where the modifications are 2′-O-methyl or 2′-fluoro modifications;

[0118] modifications on N_{b} differ from the modification on Y and modifications on N_{b}′ differ from the modification on Y′; and

[0119] where the sense strand is conjugated to at least one ligand, optioanlly where the ligand is one or more lipophilic, e.g., C16, ligands.

[0120] An additional aspect of the instant disclosure provides a double stranded RNAi agent for inhibiting expression of an RPS25 gene in a cell, where the double stranded RNAi agent includes a sense strand complementary to an antisense strand, where the antisense strand includes a region complementary to part of an mRNA encoding RPS25 (SEQ ID NO: 1), where each strand is about 14 to about 30 nucleotides in length, where the double stranded RNAi agent is represented by formula (III):

sense: 5′nₚ-Nₐ-(X X X)ᵢ-N_{b}-Y Y Y-N_{b}-(Z Z Z)ⱼ-Nₐ-n_{q}3′

antisense: 3′n_{p′}-N_{a′}-(X′X′X′)ₖ-N_{b′}-Y′Y′Y′-N_{b′}-(Z′Z′Z′)ₗ-N_{a′}-n_{q′}5′ (III)

[0121] where:

[0122] i, j, k, and 1 are each independently 0 or 1;

[0123] each nₚ, n_{q}, and n_{q}′, each of which may or may not be present, independently represents an overhang nucleotide;

[0124] p, q, and q′ are each independently 0-6;

[0125] n_{p′}>0 and at least one nₚ′ is linked to a neighboring nucleotide via a phosphorothioate linkage;

[0126] each Nₐ and Nₐ′ independently represents an oligonucleotide sequence including 0-25 nucleotides which are either modified or unmodified or combinations thereof, each sequence including at least two differently modified nucleotides;

[0127] each N_{b} and N_{b}′ independently represents an oligonucleotide sequence including 0-10 nucleotides which are either modified or unmodified or combinations thereof;

[0128] XXX, YYY, ZZZ, X′X′X′, Y′Y′Y′, and Z′Z′Z′ each independently represent one motif of three identical modifications on three consecutive nucleotides, and where the modifications are 2′-O-methyl or 2′-fluoro modifications;

[0129] modifications on N_{b} differ from the modification on Y and modifications on N_{b}′ differ from the modification on Y′;

[0130] where the sense strand includes at least one phosphorothioate linkage; and

[0131] where the sense strand is conjugated to at least one ligand, optionally where the ligand is one or more lipophilic, e.g., C16, ligands.

[0132] Another aspect of the instant disclosure provides a double stranded RNAi agent for inhibiting expression of an RPS25 gene in a cell, where the double stranded RNAi agent includes a sense strand complementary to an antisense strand, where the antisense strand includes a region complementary to part of an mRNA encoding RPS25 (SEQ ID NO: 1), where each strand is about 14 to about 30 nucleotides in length, where the double stranded RNAi agent is represented by formula (III):

sense: 5′nₚ-Nₐ-Y Y Y-Nₐ-n_{q}3′

antisense: 3′n_{p′}-Nₐ′-Y′Y′Y′-N_{a′}-n_{q′}5′ (IIIa)

[0133] where:

[0134] each nₚ, n_{q}, and n_{q}′, each of which may or may not be present, independently represents an overhang nucleotide;

[0135] p, q, and q′ are each independently 0-6;

[0136] n_{p′}>0 and at least one nₚ′ is linked to a neighboring nucleotide via a phosphorothioate linkage;

[0137] each Nₐ and Nₐ′ independently represents an oligonucleotide sequence including 0-25 nucleotides which are either modified or unmodified or combinations thereof, each sequence including at least two differently modified nucleotides;

[0138] YYY and Y′Y′Y′ each independently represent one motif of three identical modifications on three consecutive nucleotides, and where the modifications are 2′-O-methyl or 2′-fluoro modifications;

[0139] where the sense strand includes at least one phosphorothioate linkage; and

[0140] where the sense strand is conjugated to at least one ligand, optionally where the ligand is one or more lipophilic, e.g., C16, ligands.

[0141] An additional aspect of the instant disclosure provides a double stranded RNAi agent for inhibiting expression of an RPS25 gene, where the double stranded RNAi agent targeted to RPS25 includes a sense strand and an antisense strand forming a double stranded region, where the sense strand includes at least 15 contiguous nucleotides differing by no more than 3 nucleotides (i.e., differing by 3, 2, 1, or 0 nucleotides) from any one of the nucleotide sequences of SEQ ID NOs: 1, 3, 5, 7, and 9 and the antisense strand includes at least 15 contiguous nucleotides differing by no more than 3 nucleotides (i.e., differing by 3, 2, 1, or 0 nucleotides) from any one of the nucleotide sequences of SEQ ID NOs: 2, 4, 6, 8, and 10 for RPS25; where a substitution of a uracil for any thymine in the sequences provided in the SEQ ID NOs: 1-10 (when comparing aligned sequences) does not count as a difference that contributes to the differing by no more than 3 nucleotides from any one of the nucleotide sequences provided in SEQ ID NOs: 1-10, where substantially all of the nucleotides of the sense strand include a modification that is a 2′-O-methyl modification, a GNA or a 2′-fluoro modification, where the sense strand includes two phosphorothioate internucleotide linkages at the 5′-terminus, where substantially all of the nucleotides of the antisense strand include a modification selected from the group consisting of a 2′-O-methyl modification and a 2′-fluoro modification, where the antisense strand includes two phosphorothioate internucleotide linkages at the 5′-terminus and two phosphorothioate internucleotide linkages at the 3′-terminus, and where the sense strand is conjugated to one or more lipophilic, e.g., C16, ligands.

[0142] Another aspect of the instant disclosure provides a double stranded RNAi agent for inhibiting expression of an RPS25 gene, where the double stranded RNAi agent targeted to RPS25 includes a sense strand and an antisense strand forming a double stranded region, where the sense strand includes at least 15 contiguous nucleotides differing by no more than 3 nucleotides (i.e., differing by 3, 2, 1, or 0 nucleotides) from any one of the nucleotide sequences of SEQ ID NOs: 1, 3, 5, 7, and 9 and the antisense strand includes at least 15 contiguous nucleotides differing by no more than 3 nucleotides (i.e., differing by 3, 2, 1, or 0 nucleotides) from any one of the nucleotide sequences of SEQ ID NOs: 2, 4, 6, 8, and 10 for RPS25, where a substitution of a uracil for any thymine in the sequences provided in the SEQ ID NOs: 1-10 (when comparing aligned sequences) does not count as a difference that contributes to the differing by no more than 3 nucleotides from any one of the nucleotide sequences provided in SEQ ID NOs:1-10; where the sense strand includes at least one 3′-terminal deoxy-thymine nucleotide (dT), and where the antisense strand includes at least one 3′-terminal deoxy-thymine nucleotide (dT).

[0143] In one embodiment, all of the nucleotides of the sense strand and all of the nucleotides of the antisense strand are modified nucleotides.

[0144] In another embodiment, each strand has 19-30 nucleotides.

[0145] In certain embodiments, the antisense strand of the RNAi agent includes at least one thermally destabilizing modification of the duplex within the first 9 nucleotide positions of the 5′ region or a precursor thereof. Optionally, the thermally destabilizing modification of the duplex is one or more of

[chemical structure]

where B is nucleobase.

[0146] Another aspect of the instant disclosure provides a cell containing a double stranded RNAi agent of the instant disclosure.

[0147] An additional aspect of the instant disclosure provides a pharmaceutical composition for inhibiting expression of an RPS25 gene that includes a double stranded RNAi agent of the instant disclosure.

[0148] In one embodiment, the double stranded RNAi agent is administered in an unbuffered solution. Optionally, the unbuffered solution is saline or water.

[0149] In another embodiment, the double stranded RNAi agent is administered with a buffer solution. Optionally, the buffer solution includes acetate, citrate, prolamine, carbonate, or phosphate or any combination thereof. In another embodiment, the buffer solution is phosphate buffered saline (PBS).

[0150] Another aspect of the disclosure provides a pharmaceutical composition that includes a double stranded RNAi agent of the instant disclosure and a lipid formulation.

[0151] In one embodiment, the lipid formulation includes a lipid nanoparticle (LNP).

[0152] An additional aspect of the disclosure provides a method of inhibiting expression of an RPS25 gene in a cell, the method involving: (a) contacting the cell with a double stranded RNAi agent of the instant disclosure or a pharmaceutical composition of the instant disclosure; and (b) maintaining the cell produced in step (a) for a time sufficient to obtain degradation of the mRNA transcript of an RPS25 gene, thereby inhibiting expression of the RPS25 gene in the cell.

[0153] In one embodiment, the cell is within a subject. Optionally, the subject is a human.

[0154] In certain embodiments, the subject is a rhesus monkey, a cynomolgous monkey, a mouse, or a rat.

[0155] In certain embodiments, the human subject suffers from an RPS25-associated disease, e.g., a nucleotide repeat expansion disease, e.g., C9orf72 ALS/FTD, Huntington-Like Syndrome Due To C9orf72 Expansions, Fragile X syndrome (FXS), Myotonic dystrophy (i.e., DM1, and DM2), CAG/polyglutamine disease (e.g., Huntington's disease, Spinal and bulbar muscular atrophy (SBMA), Dentatorubral-pallidoluysian atrophy, Spinocerebellar ataxia type I, Spinocerebellar ataxia type 2, Spinocerebellar ataxia type 3, Spinocerebellar ataxia type 6, Spinocerebellar ataxia type 7, Spinocerebellar ataxia type 8, Spinocerebellar ataxia type 12, and Spinocerebellar ataxia type 17), Friedreich ataxia, Unverricht-Lundborg myoclonic epilepsy (EPM1), Oculopharyngeal muscular dystrophy (OPMD), and Fuchs endothelial corneal dystrophy (FECD) In certain embodiments RPS25 expression is inhibited by at least about 50% by the RNAi agent.

[0156] Another aspect of the disclosure provides a method of treating a subject having a disorder that would benefit from a reduction in RPS25 expression, e.g., a nucleotide repeat expansion disease, e.g., nucleotide repeat expansion diseases, such as C9orf72 ALS/FTD, Huntington-Like Syndrome Due To C9orf72 Expansions, Fragile X syndrome (FXS), Myotonic dystrophy (i.e., DM1, and DM2), CAG/polyglutamine disease (e.g., Huntington's disease, Spinal and bulbar muscular atrophy (SBMA), Dentatorubral-pallidoluysian atrophy, Spinocerebellar ataxia type I, Spinocerebellar ataxia type 2, Spinocerebellar ataxia type 3, Spinocerebellar ataxia type 6, Spinocerebellar ataxia type 7, Spinocerebellar ataxia type 8, Spinocerebellar ataxia type 12, and Spinocerebellar ataxia type 17), Friedreich ataxia, Unverricht-Lundborg myoclonic epilepsy (EPM1), Oculopharyngeal muscular dystrophy (OPMD), and Fuchs endothelial corneal dystrophy (FECD), the method involving administering to the subject a therapeutically effective amount of a double stranded RNAi agent of the disclosure or a pharmaceutical composition of the disclosure, thereby treating the subject.

[0157] In certain embodiments, the method further involves administering an additional therapeutic agent to the subject.

[0158] In certain embodiments, the double stranded RNAi agent is administered at a dose of about 0.01 mg/kg to about 50 mg/kg.

[0159] In some embodiments, the double stranded RNAi agent is administered to the subject intrathecally.

[0160] In one embodiment, the method reduces the expression of an RPS25 gene in a brain (e.g., striatum) or spine tissue. Optionally, the brain or spine tissue is striatum, cortex, cerebellum, cervical spine, lumbar spine, or thoracic spine.

[0161] Another aspect of the instant disclosure provides a method of inhibiting the expression of RPS25 in a subject, the method involving: administering to the subject a therapeutically effective amount of a double stranded RNAi agent of the disclosure or a pharmaceutical composition of the disclosure, thereby inhibiting the expression of RPS25 in the subject.

[0162] An additional aspect of the disclosure provides a method for treating or preventing an disorder or RPS25-associated disease or disorder in a subject, the method involving administering to the subject a therapeutically effective amount of a double stranded RNAi agent of the disclosure or a pharmaceutical composition of the disclosure, thereby treating or preventing an RPS25-associated disease or disorder in the subject.

[0163] In certain embodiments, the RPS25-associated disease or disorder is SCA3.

[0164] Another aspect of the instant disclosure provides a kit for performing a method of the instant disclosure, the kit including: a) a double stranded RNAi agent of the instant disclosure, and b) instructions for use, and c) optionally, a device for administering the double stranded RNAi agent to the subject.

[0165] An additional aspect of the instant disclosure provides a double stranded ribonucleic acid (RNAi) agent for inhibiting expression of an RPS25 gene, where the RNAi agent possesses a sense strand and an antisense strand, and where the antisense strand includes a region of complementarity which includes at least 15 contiguous nucleotides differing by no more than 3 nucleotides (i.e., differing by 3, 2, 1, or 0 nucleotides), e.g., at least 15 nucleotides (i.e., differing by 3, 2, 1, or 0 nucleotides), at least 19 nucleotides (i.e., differing by 3, 2, 1, or 0 nucleotides), from any one of the antisense strand nucleobase sequences of Tables 2-14. In one embodiment, the RNAi agent includes one or more of the following modifications: a 2′-O-methyl modified nucleotide, a 2′-fluoro modified nucleotide, a 2′-C-alkyl-modified nucleotide, a nucleotide comprising a glycol nucleic acid (GNA), a phosphorothioate (PS) and a vinyl phosphonate (VP). Optionally, the RNAi agent includes at least one of each of the following modifications: a 2′-O-methyl modified nucleotide, a 2′-fluoro modified nucleotide, a 2′-C-alkyl-modified nucleotide, a nucleotide comprising a glycol nucleic acid (GNA), a phosphorothioate and a vinyl phosphonate (VP).

[0166] In another embodiment, the RNAi agent includes four or more PS modifications, optionally six to ten PS modifications, optionally eight PS modifications.

[0167] In an additional embodiment, each of the sense strand and the antisense strand of the RNAi agent possesses a 5′-terminus and a 3′-terminus, and the RNAi agent includes eight PS modifications positioned at each of the penultimate and ultimate internucleotide linkages from the respective 3′- and 5′-termini of each of the sense and antisense strands of the RNAi agent.

[0168] In another embodiment, each of the sense strand and the antisense strand of the RNAi agent includes a 5′-terminus and a 3′-terminus, and the RNAi agent includes only one nucleotide including a GNA. Optionally, the nucleotide including a GNA is positioned on the antisense strand at the seventh nucleobase residue from the 5′-terminus of the antisense strand.

[0169] In an additional embodiment, each of the sense strand and the antisense strand of the RNAi agent includes a 5′-terminus and a 3′-terminus, and the RNAi agent includes one to four 2′-C-alkyl-modified nucleotides. Optionally, the 2′-C-alkyl-modified nucleotide is a 2′-C16-modified nucleotide. Optionally, the RNAi agent includes a single 2′-C-alkyl, e.g., C16-modified nucleotide. Optionally, the single 2′-C-alkyl, e.g., C16-modified nucleotide is located on the sense strand at the sixth nucleobase position from the 5′-terminus of the sense strand.

[0170] In another embodiment, each of the sense strand and the antisense strand of the RNAi agent includes a 5′-terminus and a 3′-terminus, and the RNAi agent includes two or more 2′-fluoro modified nucleotides. Optionally, each of the sense strand and the antisense strand of the RNAi agent includes two or more 2′-fluoro modified nucleotides. Optionally, the 2′-fluoro modified nucleotides are located on the sense strand at nucleobase positions 7, 9, 10 and 11 from the 5′-terminus of the sense strand and on the antisense strand at nucleobase positions 2, 14 and 16 from the 5′-terminus of the antisense strand.

[0171] In an additional embodiment, each of the sense strand and the antisense strand of the RNAi agent includes a 5′-terminus and a 3′-terminus, and the RNAi agent includes one or more VP modifications. Optionally, the RNAi agent includes a single VP modification at the 5′-terminus of the antisense strand.

[0172] In another embodiment, each of the sense strand and the antisense strand of the RNAi agent includes a 5′-terminus and a 3′-terminus, and the RNAi agent includes two or more 2′-O-methyl modified nucleotides. Optionally, the RNAi agent includes 2′-O-methyl modified nucleotides at all nucleobase locations not modified by a 2′-fluoro, a 2′-C-alkyl or a glycol nucleic acid (GNA). Optionally, the two or more 2′-O-methyl modified nucleotides are located on the sense strand at positions 1, 2, 3, 4, 5, 8, 12, 13, 14, 15, 16, 17, 18, 19, 20 and 21 from the 5′-terminus of the sense strand and on the antisense strand at positions 1, 3, 4, 5, 6, 8, 9, 10, 11, 12, 13, 15, 17, 18, 19, 20, 21, 22 and 23 from the 5′-terminus of the antisense strand.

### DETAILED DESCRIPTION OF THE INVENTION

[0173] The present disclosure provides RNAi compositions, which effect the RNA-induced silencing complex (RISC)-mediated cleavage of RNA transcripts of an gene. The RPS25 gene may be within a cell, e.g., a cell within a subject, such as a human. The present disclosure also provides methods of using the RNAi compositions of the disclosure for inhibiting the expression of an RPS25 gene or for treating a subject having a disorder that would benefit from inhibiting or reducing the expression of an RPS25 gene, e.g., an RPS25-associated disease, for example, C9orf72 ALS/FTD.

[0174] The RNAi agents of the disclosure include an RNA strand (the antisense strand) having a region which is about 30 nucleotides or less in length, e.g., 15-30, 15-29, 15-28, 15-27, 15-26, 15-25, 15-24, 15-23, 15-22, 15-21, 15-20, 15-19, 15-18, 15-17, 18-30, 18-29, 18-28, 18-27, 18-26, 18-25, 18-24, 18-23, 18-22, 18-21, 18-20, 19-30, 19-29, 19-28, 19-27, 19-26, 19-25, 19-24, 19-23, 19-22, 19-21, 19-20, 20-30, 20-29, 20-28, 20-27, 20-26, 20-25, 20-24,20-23, 20-22, 20-21, 21-30, 21-29, 21-28, 21-27, 21-26, 21-25, 21-24, 21-23, or 21-22 nucleotides in length, which region is substantially complementary to at least part of an mRNA transcript of an RPS25 gene. In certain embodiments, the RNAi agents of the disclosure include an RNA strand (the antisense strand) having a region which is about 21-23 nucleotides in length, which region is substantially complementary to at least part of an mRNA transcript of an RPS25 gene.

[0175] In certain embodiments, the RNAi agents of the disclosure include an RNA strand (the antisense strand) which can include longer lengths, for example up to 66 nucleotides, e.g., 36-66, 26-36, 25-36, 31-60, 22-43, 27-53 nucleotides in length with a region of at least 19 contiguous nucleotides that is substantially complementary to at least a part of an mRNA transcript of an RPS25 gene. These RNAi agents with the longer length antisense strands preferably include a second RNA strand (the sense strand) of 20-60 nucleotides in length wherein the sense and antisense strands form a duplex of 18-30 contiguous nucleotides.

[0176] The use of these RNAi agents enables the targeted degradation of mRNAs of an RPS25 gene in mammals Thus, methods and compositions including these RNAi agents are useful for treating a subject who would benefit by a reduction in the levels or activity of an RPS25 protein, such as a subject having an RPS25-associated disease, such as nucleotide repeat expansion diseases, such as C9orf72 ALS/FTD, Huntington-Like Syndrome Due To C9orf72 Expansions, Fragile X syndrome (FXS), Myotonic dystrophy (i.e., DM1, and DM2), CAG/polyglutamine disease (e.g., Huntington's disease, Spinal and bulbar muscular atrophy (SBMA), Dentatorubral-pallidoluysian atrophy, Spinocerebellar ataxia type I, Spinocerebellar ataxia type 2, Spinocerebellar ataxia type 3, Spinocerebellar ataxia type 6, Spinocerebellar ataxia type 7, Spinocerebellar ataxia type 8, Spinocerebellar ataxia type 12, and Spinocerebellar ataxia type 17), Friedreich ataxia, Unverricht-Lundborg myoclonic epilepsy (EPM1), Oculopharyngeal muscular dystrophy (OPMD), and Fuchs endothelial corneal dystrophy (FECD).

[0177] The following detailed description discloses how to make and use compositions containing RNAi agents to inhibit the expression of an RPS25 gene, as well as compositions and methods for treating subjects having diseases and disorders that would benefit from inhibition or reduction of the expression of the genes.

### I. Definitions

[0178] In order that the present disclosure may be more readily understood, certain terms are first defined. In addition, it should be noted that whenever a value or range of values of a parameter are recited, it is intended that values and ranges intermediate to the recited values are also intended to be part of this disclosure.

[0179] The articles “a” and “an” are used herein to refer to one or to more than one (i.e., to at least one) of the grammatical object of the article. By way of example, “an element” means one element or more than one element, e.g., a plurality of elements.

[0180] The term “including” is used herein to mean, and is used interchangeably with, the phrase “including but not limited to”. The term “or” is used herein to mean, and is used interchangeably with, the term “and/or,” unless context clearly indicates otherwise.

[0181] The term “about” is used herein to mean within the typical ranges of tolerances in the art. For example, “about” can be understood as about 2 standard deviations from the mean. In certain embodiments, about means±10%. In certain embodiments, about means±5%. When about is present before a series of numbers or a range, it is understood that “about” can modify each of the numbers in the series or range.

[0182] The term “at least” prior to a number or series of numbers is understood to include the number adjacent to the term “at least”, and all subsequent numbers or integers that could logically be included, as clear from context. For example, the number of nucleotides in a nucleic acid molecule must be an integer. For example, “at least 18 nucleotides of a 21 nucleotide nucleic acid molecule” means that 18, 19, 20, or 21 nucleotides have the indicated property. When at least is present before a series of numbers or a range, it is understood that “at least” can modify each of the numbers in the series or range.

[0183] As used herein, “no more than” or “less than” is understood as the value adjacent to the phrase and logical lower values or intergers, as logical from context, to zero. For example, a duplex with an overhang of “no more than 2 nucleotides” has a 2, 1, or 0 nucleotide overhang. When “no more than” is present before a series of numbers or a range, it is understood that “no more than” can modify each of the numbers in the series or range.

[0184] As used herein, methods of detection can include determination that the amount of analyte present is below the level of detection of the method.

[0185] In the event of a conflict between an indicated target site and the nucleotide sequence for a sense or antisense strand, the indicated sequence takes precedence.

[0186] In the event of a conflict between a chemical structure and a chemical name, the chemical structure takes precedence.

[0187] The term “rps25” or “RPS25”, also known as “Small Ribosomal Protein S25,” “Ribosomal Protein S25,” “Small Ribosomal Subunit Protein ES25,” “40S Ribosomal Protein S25,” and “S25,” refers to the well-known gene that encodes the protein, RPS25, that is a component of the 40S subunit of the ribosome. RPS25 has been shown to drive “repeat-associated non-AUG (“RAN”)-initiated translation.” RAN-initiated translation,” also referred to as “RAN-translation,” is a non-canonical translational initiation process which enables protein elongation through a repeat strand in the absence of an AUG initiation codon and in multiple reading frames, producing multiple homopolymeric or dipeptide repeat-containing proteins.

[0188] Nucleotide and amino acid sequences of RPS25 can be found, for example, at GenBank Accession No. NM_001028.3 (Homo sapiens RPS25, SEQ ID NO: 1, reverse complement, SEQ ID NO: 2); GenBank Accession No. NM_024266.3 (Mus musculus RPS25, SEQ ID NO: 3; reverse complement, SEQ ID NO: 4); GenBank Accession No.: NM_001005528.1 (Rattus norvegicus RPS25, SEQ ID NO: 5, reverse complement, SEQ ID NO: 6); GenBank Accession No.: XM_015115940.1 (Macaca mulatta RPS25, SEQ ID NO: 7, reverse complement, SEQ ID NO: 8); and GenBank Accession No.: NM_001285107.1 (Macaca fascicularis RPS25, SEQ ID NO: 9, reverse complement, SEQ ID NO: 10).

[0189] Additional examples of RPS25 sequences can be found in publically available databases, for example, GenBank, OMIM, and UniProt. Additional information on RPS25 can be found, for example, at www.ncbi.nlm.nih.gov/gene/6230.

[0190] The term RPS25 as used herein also refers to variations of the RPS25 gene including variants provided in the SNP database, for example, at www.ncbi.nlm.nih.gov/snp/?term=rps25.

[0191] The term “C9orf72” gene, also known as “C9orf72-SMCR8 Complex Subunit,” Guanine Nucleotide Exchange C9orf72,” “Chromosome 9 Open Reading Frame 72, “Protein C9orf72,” “DENNL72,” “FTDALS1,” “ALSFTD”, and “FTDALS,” refers to the gene encoding the well-known protein involved in the regulation of endosomal trafficking, C9ORF72. The C9orf72 protein has been shown to interact with Rab proteins that are involved in autophagy and endocytic transport. Expansion of a GGGGCC repeat from 2-22 copies (SEQ ID NO. 14) to 700-1600 copies (SEQ ID NO: 15) in the intronic sequence between alternate 5′ exons in transcripts from this gene is associated with C9orf72 amyotrophic lateral sclerosis/frontotemporal dementia and Huntington's Disease, e.g., Huntington-Like Syndrome Due To C9orf72 Expansions. Alternative splicing results in multiple transcript variants encoding different isoforms.

[0192] Nucleotide and amino acid sequences of C9orf72 can be found, for example, at GenBank Accession No. NM_145005.6, transcript variant 1 (SEQ ID NO:11); NM_018325.5, transcript variant 2 (SEQ ID NO:12); and NM_001256054.2, transcript variant 3 (SEQ ID NO:13) (Homo sapiens).

[0193] Additional examples of C9orf72 sequences can be found in publically available databases, for example, GenBank, OMIM, and UniProt. Additional information on C9orf72 can be found, for example, at www.ncbi.nlm.nih.gov/gene/?term=c9orf72.

[0194] The term C9orf72 as used herein also refers to variations of the C9orf72 gene including variants provided in the SNP database, for example, at www.ncbi.nlm.nih.gov/snp/?term=c9orf72.

[0195] As used herein, “target sequence” refers to a contiguous portion of the nucleotide sequence of an mRNA molecule formed during the transcription of an RPS25 gene, including mRNA that is a product of RNA processing of a primary transcription product. In one embodiment, the target portion of the sequence will be at least long enough to serve as a substrate for RNAi-directed cleavage at or near that portion of the nucleotide sequence of an mRNA molecule formed during the transcription of an RPS25 gene.

[0196] The target sequence is about 15-30 nucleotides in length. For example, the target sequence can be from about 15-30 nucleotides, 15-29, 15-28, 15-27, 15-26, 15-25, 15-24, 15-23, 15-22, 15-21, 15-20, 15-19, 15-18, 15-17, 18-30, 18-29, 18-28, 18-27, 18-26, 18-25, 18-24, 18-23, 18-22, 18-21, 18-20, 19-30, 19-29, 19-28, 19-27, 19-26, 19-25, 19-24, 19-23, 19-22, 19-21, 19-20, 20-30, 20-29, 20-28, 20-27, 20-26, 20-25, 20-24,20-23, 20-22, 20-21, 21-30, 21-29, 21-28, 21-27, 21-26, 21-25, 21-24, 21-23, or 21-22 nucleotides in length. In certain embodiments, the target sequence is 19-23 nucleotides in length, optionally 21-23 nucleotides in length. Ranges and lengths intermediate to the above recited ranges and lengths are also contemplated to be part of the disclosure.

[0197] As used herein, the term “strand comprising a sequence” refers to an oligonucleotide comprising a chain of nucleotides that is described by the sequence referred to using the standard nucleotide nomenclature.

[0198] “G,” “C,” “A,” “T”, and “U” each generally stand for a nucleotide that contains guanine, cytosine, adenine, thymidine, and uracil as a base, respectively in the context of a modified or unmodified nucleotide. However, it will be understood that the term “ribonucleotide” or “nucleotide” can also refer to a modified nucleotide, as further detailed below, or a surrogate replacement moiety (see, e.g., Table 1). The skilled person is well aware that guanine, cytosine, adenine, thymidine, and uracil can be replaced by other moieties without substantially altering the base pairing properties of an oligonucleotide comprising a nucleotide bearing such replacement moiety. For example, without limitation, a nucleotide comprising inosine as its base can base pair with nucleotides containing adenine, cytosine, or uracil. Hence, nucleotides containing uracil, guanine, or adenine can be replaced in the nucleotide sequences of dsRNA featured in the disclosure by a nucleotide containing, for example, inosine. In another example, adenine and cytosine anywhere in the oligonucleotide can be replaced with guanine and uracil, respectively to form G-U Wobble base pairing with the target mRNA. Sequences containing such replacement moieties are suitable for the compositions and methods featured in the disclosure.

[0199] The terms “iRNA”, “RNAi agent,” “iRNA agent,” “RNA interference agent” as used interchangeably herein, refer to an agent that contains RNA as that term is defined herein, and which mediates the targeted cleavage of an RNA transcript via an RNA-induced silencing complex (RISC) pathway. RNA interference (RNAi) is a process that directs the sequence-specific degradation of mRNA. RNAi modulates, e.g., inhibits, the expression of RPS25 in a cell, e.g., a cell within a subject, such as a mammalian subject.

[0200] In one embodiment, an RNAi agent of the disclosure includes a single stranded RNAi that interacts with a target RNA sequence, e.g., an RPS25 target mRNA sequence, to direct the cleavage of the target RNA. Without wishing to be bound by theory it is believed that long double stranded RNA introduced into cells is broken down into double-stranded short interfering RNAs (siRNAs) comprising a sense strand and an antisense strand by a Type III endonuclease known as Dicer (Sharp et al. (2001) Genes Dev. 15:485). Dicer, a ribonuclease-III-like enzyme, processes these dsRNA into 19-23 base pair short interfering RNAs with characteristic two base 3′ overhangs (Bernstein, et al., (2001) Nature 409:363). These siRNAs are then incorporated into an RNA-induced silencing complex (RISC) where one or more helicases unwind the siRNA duplex, enabling the complementary antisense strand to guide target recognition (Nykanen, et al., (2001) Cell 107:309). Upon binding to the appropriate target mRNA, one or more endonucleases within the RISC cleave the target to induce silencing (Elbashir, et al., (2001) Genes Dev. 15:188). Thus, in one aspect the disclosure relates to a single stranded RNA (ssRNA) (the antisense strand of a siRNA duplex) generated within a cell and which promotes the formation of a RISC complex to effect silencing of the target gene, i.e., an RPS25 gene. Accordingly, the term “siRNA” is also used herein to refer to an RNAi as described above.

[0201] In another embodiment, the RNAi agent may be a single-stranded RNA that is introduced into a cell or organism to inhibit a target mRNA. Single-stranded RNAi agents bind to the RISC endonuclease, Argonaute 2, which then cleaves the target mRNA. The single-stranded siRNAs are generally 15-30 nucleotides and are chemically modified. The design and testing of single-stranded RNAs are described in U.S. Pat. No. 8,101,348 and in Lima et al., (2012) Cell 150:883-894, the entire contents of each of which are hereby incorporated herein by reference. Any of the antisense nucleotide sequences described herein may be used as a single-stranded siRNA as described herein or as chemically modified by the methods described in Lima et al., (2012) Cell 150:883-894.

[0202] In another embodiment, a “RNAi agent” for use in the compositions and methods of the disclosure is a double stranded RNA and is referred to herein as a “double stranded RNAi agent,” “double stranded RNA (dsRNA) molecule,” “dsRNA agent,” or “dsRNA”. The term “dsRNA” refers to a complex of ribonucleic acid molecules, having a duplex structure comprising two anti-parallel and substantially complementary nucleic acid strands, referred to as having “sense” and “antisense” orientations with respect to a target RNA, i.e., an RPS25 gene. In some embodiments of the disclosure, a double stranded RNA (dsRNA) triggers the degradation of a target RNA, e.g., an mRNA, through a post-transcriptional gene-silencing mechanism referred to herein as RNA interference or RNAi.

[0203] In general, a dsRNA molecule can include ribonucleotides, but as described in detail herein, each or both strands can also include one or more non-ribonucleotides, e.g., a deoxyribonucleotide, a modified nucleotide. In addition, as used in this specification, an “RNAi agent” may include ribonucleotides with chemical modifications; an RNAi agent may include substantial modifications at multiple nucleotides. As used herein, the term “modified nucleotide” refers to a nucleotide having, independently, a modified sugar moiety, a modified internucleotide linkage, or a modified nucleobase. Thus, the term modified nucleotide encompasses substitutions, additions or removal of, e.g., a functional group or atom, to internucleoside linkages, sugar moieties, or nucleobases. The modifications suitable for use in the agents of the disclosure include all types of modifications disclosed herein or known in the art. Any such modifications, as used in a siRNA type molecule, are encompassed by “RNAi agent” for the purposes of this specification and claims.

[0204] In certain embodiments of the instant disclosure, inclusion of a deoxy-nucleotide—which is acknowledged as a naturally occurring form of nucleotide—if present within a RNAi agent can be considered to constitute a modified nucleotide.

[0205] The duplex region may be of any length that permits specific degradation of a desired target RNA through a RISC pathway, and may range from about 15-36 base pairs in length, for example, about 15, 16, 17, 18, 19, 20, 21, 22, 23, 24, 25, 26, 27, 28, 29, 30, 31, 32, 33, 34, 35, or 36 base pairs in length, such as about 15-30, 15-29, 15-28, 15-27, 15-26, 15-25, 15-24, 15-23, 15-22, 15-21, 15-20, 15-19, 15-18, 15-17, 18-30, 18-29, 18-28, 18-27, 18-26, 18-25, 18-24, 18-23, 18-22, 18-21, 18-20, 19-30, 19-29, 19-28, 19-27, 19-26, 19-25, 19-24, 19-23, 19-22, 19-21, 19-20, 20-30, 20-29, 20-28, 20-27, 20-26, 20-25, 20-24,20-23, 20-22, 20-21, 21-30, 21-29, 21-28, 21-27, 21-26, 21-25, 21-24, 21-23, or 21-22 base pairs in length. In certain embodiments, the duplex region is 19-21 base pairs in length, e.g., 21 base pairs in length. Ranges and lengths intermediate to the above recited ranges and lengths are also contemplated to be part of the disclosure.

[0206] The two strands forming the duplex structure may be different portions of one larger RNA molecule, or they may be separate RNA molecules. Where the two strands are part of one larger molecule, and therefore are connected by an uninterrupted chain of nucleotides between the 3′-end of one strand and the 5′-end of the respective other strand forming the duplex structure, the connecting RNA chain is referred to as a “hairpin loop.” A hairpin loop can comprise at least one unpaired nucleotide. In some embodiments, the hairpin loop can comprise at at least 4, at least 5, at least 6, at least 7, at least 8, at least 9, at least 10, at least 20, at least 23 or more unpaired nucleotides or nucleotides not directed to the target site of the dsRNA. In some embodiments, the hairpin loop can be 10 or fewer nucleotides. In some embodiments, the hairpin loop can be 8 or fewer unpaired nucleotides. In some embodiments, the hairpin loop can be 4-10 unpaired nucleotides. In some embodiments, the hairpin loop can be 4-8 nucleotides.

[0207] Where the two substantially complementary strands of a dsRNA are comprised by separate RNA molecules, those molecules need not, but can be covalently connected. In certain embodiments where the two strands are connected covalently by means other than an uninterrupted chain of nucleotides between the 3′-end of one strand and the 5′-end of the respective other strand forming the duplex structure, the connecting structure is referred to as a “linker” (though it is noted that certain other structures defined elsewhere herein can also be referred to as a “linker”). The RNA strands may have the same or a different number of nucleotides. The maximum number of base pairs is the number of nucleotides in the shortest strand of the dsRNA minus any overhangs that are present in the duplex. In addition to the duplex structure, an RNAi may comprise one or more nucleotide overhangs. In one embodiment of the RNAi agent, at least one strand comprises a 3′ overhang of at least 1 nucleotide. In another embodiment, at least one strand comprises a 3′ overhang of at least 2 nucleotides, e.g., 2, 3, 4, 5, 6, 7, 9, 10, 11, 12, 13, 14, or 15 nucleotides. In other embodiments, at least one strand of the RNAi agent comprises a 5′ overhang of at least 1 nucleotide. In certain embodiments, at least one strand comprises a 5′ overhang of at least 2 nucleotides, e.g., 2, 3, 4, 5, 6, 7, 9, 10, 11, 12, 13, 14, or 15 nucleotides. In still other embodiments, both the 3′ and the 5′ end of one strand of the RNAi agent comprise an overhang of at least 1 nucleotide.

[0208] In one embodiment, an RNAi agent of the disclosure is a dsRNA, each strand of which independently comprises 19-23 nucleotides, that interacts with a target RNA sequence, e.g., an RPS25 target mRNA sequence, to direct the cleavage of the target RNA.

[0209] As used herein, the term “nucleotide overhang” refers to at least one unpaired nucleotide that protrudes from the duplex structure of a RNAi agent, e.g., a dsRNA. For example, when a 3′-end of one strand of a dsRNA extends beyond the 5′-end of the other strand, or vice versa, there is a nucleotide overhang. A dsRNA can comprise an overhang of at least one nucleotide; alternatively, the overhang can comprise at least two nucleotides, at least three nucleotides, at least four nucleotides, at least five nucleotides or more. A nucleotide overhang can comprise or consist of a nucleotide/nucleoside analog, including a deoxynucleotide/nucleoside. The overhang(s) can be on the sense strand, the antisense strand or any combination thereof. Furthermore, the nucleotide(s) of an overhang can be present on the 5′-end, 3′-end or both ends of either an antisense or sense strand of a dsRNA.

[0210] In one embodiment, the antisense strand of a dsRNA has a 1-10 nucleotide, e.g., a 1, 2, 3, 4, 5, 6, 7, 8, 9, or 10 nucleotide, overhang at the 3′-end or the 5′-end. In one embodiment, the sense strand of a dsRNA has a 1-10 nucleotide, e.g., a 1, 2, 3, 4, 5, 6, 7, 8, 9, or 10 nucleotide, overhang at the 3′-end or the 5′-end. In another embodiment, one or more of the nucleotides in the overhang is replaced with a nucleoside thiophosphate.

[0211] In certain embodiments, the antisense strand of a dsRNA has a 1-10 nucleotide, e.g., 0-3, 1-3, 2-4, 2-5, 4-10, 5-10, e.g., a 1, 2, 3, 4, 5, 6, 7, 8, 9, or 10 nucleotide, overhang at the 3′-end or the 5′-end. In one embodiment, the sense strand of a dsRNA has a 1-10 nucleotide, e.g., a 1, 2, 3, 4, 5, 6, 7, 8, 9, or 10 nucleotide, overhang at the 3′-end or the 5′-end. In another embodiment, one or more of the nucleotides in the overhang is replaced with a nucleoside thiophosphate.

[0212] In certain embodiments, the overhang on the sense strand or the antisense strand, can include extended lengths longer than 10 nucleotides, e.g., 1-30 nucleotides, 2-30 nucleotides, 10-30 nucleotides, or 10-15 nucleotides in length. In certain embodiments, an extended overhang is on the sense strand of the duplex. In certain embodiments, an extended overhang is present on the 3′ end of the sense strand of the duplex. In certain embodiments, an extended overhang is present on the 5′ end of the sense strand of the duplex. In certain embodiments, an extended overhang is on the antisense strand of the duplex. In certain embodiments, an extended overhang is present on the 3′ end of the antisense strand of the duplex. In certain embodiments, an extended overhang is present on the 5′ end of the antisense strand of the duplex. In certain embodiments, one or more of the nucleotides in the overhang is replaced with a nucleoside thiophosphate. In certain embodiments, the overhang includes a self-complementary portion such that the overhang is capable of forming a hairpin structure that is stable under physiological conditions.

[0213] The terms “blunt” or “blunt ended” as used herein in reference to a dsRNA mean that there are no unpaired nucleotides or nucleotide analogs at a given terminal end of a dsRNA, i.e., no nucleotide overhang. One or both ends of a dsRNA can be blunt. Where both ends of a dsRNA are blunt, the dsRNA is said to be blunt ended. To be clear, a “blunt ended” dsRNA is a dsRNA that is blunt at both ends, i.e., no nucleotide overhang at either end of the molecule. Most often such a molecule will be double stranded over its entire length.

[0214] The term “antisense strand” or “guide strand” refers to the strand of a RNAi agent, e.g., a dsRNA, which includes a region that is substantially complementary to a target sequence, e.g., an RPS25 mRNA.

[0215] As used herein, the term “region of complementarity” refers to the region on the antisense strand that is substantially complementary to a sequence, for example a target sequence, e.g., an RPS25 nucleotide sequence, as defined herein. Where the region of complementarity is not fully complementary to the target sequence, the mismatches can be in the internal or terminal regions of the molecule. Generally, the most tolerated mismatches are in the terminal regions, e.g., within 5, 4, 3, or 2 nucleotides of the 5′- or 3′-terminus of the RNAi agent.

[0216] The term “sense strand” or “passenger strand” as used herein, refers to the strand of a RNAi agent that includes a region that is substantially complementary to a region of the antisense strand as that term is defined herein.

[0217] As used herein, the term “cleavage region” refers to a region that is located immediately adjacent to the cleavage site. The cleavage site is the site on the target at which cleavage occurs. In some embodiments, the cleavage region comprises three bases on either end of, and immediately adjacent to, the cleavage site. In some embodiments, the cleavage region comprises two bases on either end of, and immediately adjacent to, the cleavage site. In some embodiments, the cleavage site specifically occurs at the site bound by nucleotides 10 and 11 of the antisense strand, and the cleavage region comprises nucleotides 11, 12 and 13.

[0218] As used herein, and unless otherwise indicated, the term “complementary,” when used to describe a first nucleotide sequence in relation to a second nucleotide sequence, refers to the ability of an oligonucleotide or polynucleotide comprising the first nucleotide sequence to hybridize and form a duplex structure under certain conditions with an oligonucleotide or polynucleotide comprising the second nucleotide sequence, as will be understood by the skilled person.

[0219] Complementary sequences within a RNAi agent, e.g., within a dsRNA as described herein, include base-pairing of the oligonucleotide or polynucleotide comprising a first nucleotide sequence to an oligonucleotide or polynucleotide comprising a second nucleotide sequence over the entire length of one or both nucleotide sequences. Such sequences can be referred to as “fully complementary” with respect to each other herein. However, where a first sequence is referred to as “substantially complementary” with respect to a second sequence herein, the two sequences can be fully complementary, or they can form one or more, but generally not more than 5, 4, 3 or 2 mismatched base pairs upon hybridization for a duplex up to 30 base pairs, while retaining the ability to hybridize under the conditions most relevant to their ultimate application, e.g., inhibition of gene expression via a RISC pathway. However, where two oligonucleotides are designed to form, upon hybridization, one or more single stranded overhangs, such overhangs shall not be regarded as mismatches with regard to the determination of complementarity. For example, a dsRNA comprising one oligonucleotide 21 nucleotides in length and another oligonucleotide 23 nucleotides in length, wherein the longer oligonucleotide comprises a sequence of 21 nucleotides that is fully complementary to the shorter oligonucleotide, can yet be referred to as “fully complementary” for the purposes described herein.

[0220] “Complementary” sequences, as used herein, can also include, or be formed entirely from, non-Watson-Crick base pairs or base pairs formed from non-natural and modified nucleotides, in so far as the above requirements with respect to their ability to hybridize are fulfilled. Such non-Watson-Crick base pairs include, but are not limited to, G:U Wobble or Hoogstein base pairing.

[0221] The terms “complementary,” “fully complementary” and “substantially complementary” herein can be used with respect to the base matching between the sense strand and the antisense strand of a dsRNA, or between the antisense strand of a RNAi agent and a target sequence, as will be understood from the context of their use.

[0222] As used herein, a polynucleotide that is “substantially complementary to at least part of” a messenger RNA (mRNA) refers to a polynucleotide that is substantially complementary to a contiguous portion of the mRNA of interest (e.g., an mRNA encoding RPS25). For example, a polynucleotide is complementary to at least a part of an RPS25 mRNA if the sequence is substantially complementary to a non-interrupted portion of an mRNA encoding RPS25.

[0223] Accordingly, in some embodiments, the antisense strand polynucleotides disclosed herein are fully complementary to the target RPS25 sequence. In other embodiments, the antisense strand polynucleotides disclosed herein are substantially complementary to the target RPS25 sequence and comprise a contiguous nucleotide sequence which is at least about 80% complementary over its entire length to the equivalent region of the nucleotide sequence of SEQ ID NOs: 1, 3, 5, 7, or 9 for RPS25, or a fragment of SEQ ID NOs: 1, 3, 5, 7, or 9 for RPS25, such as about 85%, about 90%, about 95%, or about 99% complementary.

[0224] In other embodiments, the antisense polynucleotides disclosed herein are substantially complementary to the target RPS25 sequence and comprise a contiguous nucleotide sequence which is at least about 80% complementary over its entire length to any one of the sense strand nucleotide sequences in any one of any one of Tables 2-14 for RPS25, or a fragment of any one of the sense strand nucleotide sequences in any one of Tables 2-14 for RPS25, such as about 85%, about 90%, about 95%, or about 99% complementary.

[0225] In one embodiment, an RNAi agent of the disclosure includes a sense strand that is substantially complementary to an antisense polynucleotide which, in turn, is the same as a target RPS25 sequence, and wherein the sense strand polynucleotide comprises a contiguous nucleotide sequence which is at least about 80% complementary over its entire length to the equivalent region of the nucleotide sequence of SEQ ID NOs: 2, 4, 6, 8, or 10, or a fragment of any one of SEQ ID NOs: 2, 4, 6, 8, or 10, such as about 85%, 90%, about 95%, or about 99% complementary.

[0226] In one embodiment, at least partial suppression of the expression of an RPS25 gene, is assessed by a reduction of the amount of RPS25 mRNA which can be isolated from or detected in a first cell or group of cells in which an RPS25 gene is transcribed and which has or have been treated such that the expression of an RPS25 gene is inhibited, as compared to a second cell or group of cells substantially identical to the first cell or group of cells but which has or have not been so treated (control cells). The degree of inhibition may be expressed in terms of:

$$\frac{( mRNA in control cells ) - ( mRNA in treated cells )}{( mRNA in control cells )} \cdot 100 \%$$

[0227] The phrase “contacting a cell with an RNAi agent,” such as a dsRNA, as used herein, includes contacting a cell by any possible means. Contacting a cell with an RNAi agent includes contacting a cell in vitro with the RNAi agent or contacting a cell in vivo with the RNAi agent. The contacting may be done directly or indirectly. Thus, for example, the RNAi agent may be put into physical contact with the cell by the individual performing the method, or alternatively, the RNAi agent may be put into a situation that will permit or cause it to subsequently come into contact with the cell.

[0228] Contacting a cell in vitro may be done, for example, by incubating the cell with the RNAi agent. Contacting a cell in vivo may be done, for example, by injecting the RNAi agent into or near the tissue where the cell is located, or by injecting the RNAi agent into another area, e.g., the central nervous system (CNS), optionally via intrathecal, intravitreal or other injection, or to the bloodstream or the subcutaneous space, such that the agent will subsequently reach the tissue where the cell to be contacted is located. For example, the RNAi agent may contain or be coupled to a ligand, e.g., a lipophilic moiety or moieties as described below and further detailed, e.g., in PCT/US2019/031170, which is incorporated herein by reference, that directs or otherwise stabilizes the RNAi agent at a site of interest, e.g., the CNS. Combinations of in vitro and in vivo methods of contacting are also possible. For example, a cell may also be contacted in vitro with an RNAi agent and subsequently transplanted into a subject.

[0229] In one embodiment, contacting a cell with a RNAi agent includes “introducing” or “delivering the RNAi agent into the cell” by facilitating or effecting uptake or absorption into the cell. Absorption or uptake of a RNAi agent can occur through unaided diffusive or active cellular processes, or by auxiliary agents or devices. Introducing a RNAi agent into a cell may be in vitro or in vivo. For example, for in vivo introduction, a RNAi agent can be injected into a tissue site or administered systemically. In vitro introduction into a cell includes methods known in the art such as electroporation and lipofection. Further approaches are described herein below or are known in the art.

[0230] The term “lipophile” or “lipophilic moiety” broadly refers to any compound or chemical moiety having an affinity for lipids. One way to characterize the lipophilicity of the lipophilic moiety is by the octanol-water partition coefficient, logK_{ow}, where K_{ow} is the ratio of a chemical's concentration in the octanol-phase to its concentration in the aqueous phase of a two-phase system at equilibrium. The octanol-water partition coefficient is a laboratory-measured property of a substance. However, it may also be predicted by using coefficients attributed to the structural components of a chemical which are calculated using first-principle or empirical methods (see, for example, Tetko et al., J. Chem. Inf. Comput. Sci. 41:1407-21 (2001), which is incorporated herein by reference in its entirety). It provides a thermodynamic measure of the tendency of the substance to prefer a non-aqueous or oily milieu rather than water (i.e. its hydrophilic/lipophilic balance). In principle, a chemical substance is lipophilic in character when its logK_{ow} exceeds 0. Typically, the lipophilic moiety possesses a logK_{ow} exceeding 1, exceeding 1.5, exceeding 2, exceeding 3, exceeding 4, exceeding 5, or exceeding 10. For instance, the logK_{ow} of 6-amino hexanol, for instance, is predicted to be approximately 0.7. Using the same method, the logK_{ow} of cholesteryl N-(hexan-6-ol) carbamate is predicted to be 10.7.

[0231] The lipophilicity of a molecule can change with respect to the functional group it carries. For instance, adding a hydroxyl group or amine group to the end of a lipophilic moiety can increase or decrease the partition coefficient (e.g., logK_{ow}) value of the lipophilic moiety.

[0232] Alternatively, the hydrophobicity of the double-stranded RNAi agent, conjugated to one or more lipophilic moieties, can be measured by its protein binding characteristics. For instance, in certain embodiments, the unbound fraction in the plasma protein binding assay of the double-stranded RNAi agent could be determined to positively correlate to the relative hydrophobicity of the double-stranded RNAi agent, which could then positively correlate to the silencing activity of the double-stranded RNAi agent.

[0233] In one embodiment, the plasma protein binding assay determined is an electrophoretic mobility shift assay (EMSA) using human serum albumin protein. An exemplary protocol of this binding assay is illustrated in detail in, e.g., PCT/US2019/031170. The hydrophobicity of the double-stranded RNAi agent, measured by fraction of unbound siRNA in the binding assay, exceeds 0.15, exceeds 0.2, exceeds 0.25, exceeds 0.3, exceeds 0.35, exceeds 0.4, exceeds 0.45, or exceeds 0.5 for an enhanced in vivo delivery of siRNA.

[0234] Accordingly, conjugating the lipophilic moieties to the internal position(s) of the double-stranded RNAi agent provides optimal hydrophobicity for the enhanced in vivo delivery of siRNA.

[0235] The term “lipid nanoparticle” or “LNP” is a vesicle comprising a lipid layer encapsulating a pharmaceutically active molecule, such as a nucleic acid molecule, e.g., a rNAi agent or a plasmid from which a RNAi agent is transcribed. LNPs are described in, for example, U.S. Pat. Nos. 6,858,225, 6,815,432, 8,158,601, and 8,058,069, the entire contents of which are hereby incorporated herein by reference.

[0236] As used herein, a “subject” is an animal, such as a mammal, including a primate (such as a human, a non-human primate, e.g., a monkey, and a chimpanzee), or a non-primate (such as a a rat, or a mouse). In a preferred embodiment, the subject is a human, such as a human being treated or assessed for a disease, disorder, or condition that would benefit from reduction in RPS25 expression; a human at risk for a disease, disorder, or condition that would benefit from reduction in RPS25 expression; a human having a disease, disorder, or condition that would benefit from reduction in RPS25 expression; or human being treated for a disease, disorder, or condition that would benefit from reduction in RPS25 expression as described herein.

[0237] As used herein, the terms “treating” or “treatment” refer to a beneficial or desired result including, but not limited to, alleviation or amelioration of one or more signs or symptoms associated with RPS25 gene expression or RPS25 protein production, e.g., RPS25-associated diseases, such as a nucleotide repeat expansion disease, e.g., C9orf72 ALS/FTD and Huntington's disease, e.g., Huntington-Like Syndrome Due To C9orf72 Expansions. “Treatment” can also mean prolonging survival as compared to expected survival in the absence of treatment.

[0238] The term “lower” in the context of the level of RPS25 in a subject or a disease marker or symptom refers to a statistically significant decrease in such level. The decrease can be, for example, at least 10%, 15%, 20%, 25%, 30%, %, 40%, 45%, 50%, 55%, 60%, 65%, 70%, 75%, 80%, 85%, 90%, 95%, or more. In certain embodiments, a decrease is at least 20%. In certain embodiments, the decrease is at least 50% in a disease marker, e.g., protein or gene expression level. “Lower” in the context of the level of RPS25 in a subject is preferably down to a level accepted as within the range of normal for an individual without such disorder. In certain embodiments, “lower” is the decrease in the difference between the level of a marker or symptom for a subject suffering from a disease and a level accepted within the range of normal for an individual, e.g., the level of decrease in bodyweight between an obese individual and an individual having a weight accepted within the range of normal. As used herein, lowering can refer to lowering or predominantly lowering the level of mRNA of an RPS25 and/or C9orf72 or HTT gene having a nucleotide repeat expansion.

[0239] As used herein, “prevention” or “preventing,” when used in reference to a disease, disorder, or condition thereof, that would benefit from a reduction in expression of an RPS25 gene or production of an RPS25 protein, refers to a reduction in the likelihood that a subject will develop a symptom associated with such a disease, disorder, or condition, e.g., a symptom of an RPS25-associated disease. The failure to develop a disease, disorder, or condition, or the reduction in the development of a symptom associated with such a disease, disorder, or condition (e.g., by at least about 10% on a clinically accepted scale for that disease or disorder), or the exhibition of delayed symptoms delayed (e.g., by days, weeks, months or years) is considered effective prevention.

[0240] As used herein, the term “RPS25-associated disease” or “RPS25-associated disorder” is understood as any disease or disorder that would benefit from reduction in the expression and/or activity of RPS25, e.g., RAN-translation. Exemplary RPS25-associated diseases include nucleotide repeat expansion diseases, such as C9orf72 ALS/FTD, Huntington-Like Syndrome Due To C9orf72 Expansions, Fragile X syndrome (FXS), Myotonic dystrophy (i.e., DM1, and DM2), CAG/polyglutamine disease (e.g., Huntington's disease, Spinal and bulbar muscular atrophy (SBMA), Dentatorubral-pallidoluysian atrophy, Spinocerebellar ataxia type I, Spinocerebellar ataxia type 2, Spinocerebellar ataxia type 3, Spinocerebellar ataxia type 6, Spinocerebellar ataxia type 7, Spinocerebellar ataxia type 8, Spinocerebellar ataxia type 12, and Spinocerebellar ataxia type 17), Friedreich ataxia, Unverricht-Lundborg myoclonic epilepsy (EPM1), Oculopharyngeal muscular dystrophy (OPMD), and Fuchs endothelial corneal dystrophy (FECD).

[0241] A “nucleotide repeat expansion disease” is any disease or disorder that is the result of expansion of a simple sequence repeat (i.e., a microsatellite). The simple sequence repeat that is expanded may be a tri-, tetra-, penta-, hexa- or dodeca-nucleotide repeat. Exemplary nucleotide repeats include CAG (causing, e.g., Huntington disease, spinal and bulbar muscular atrophy, dentatorubral-pallidoluysian atrophy, and Spinocerebellar ataxia type I, Spinocerebellar ataxia type 2, Spinocerebellar ataxia type 3, Spinocerebellar ataxia type 6, Spinocerebellar ataxia type 7 ATXN7, and Spinocerebellar ataxia type 17), CGG (causing, e.g., fragile X syndrome, GCC and CCG (causing, e.g., FRAXE mental retardation), CTG (causing, e.g., myotonic dystrophy type 1, Huntington disease-like 2, spinocerebellar ataxia type 8, Fuchs corneal dystrophy), GAA (causing, e.g., Friedreich ataxia), GCC (causing, e.g., FRAXE mental retardation), GCG (causing, e.g., oculopharyngeal muscular dystrophy), CCTG (causing, e.g., myotonic dystrophy type 1), ATTCT (causing, e.g., spinocerebellar ataxia type 10), TGGAA (causing, e.g., spinocerebellar ataxia type 31), GGCCTG (causing, e.g., spinocerebellar ataxia type 36), GGGGCC (causing, e.g., C9ORF72 frontotemporal dementia/amyotrophic lateral sclerosis), and CCCCGCCCCGCG (SEQ ID NO: 16) (causing, e.g., myoclonic epilepsy).

[0242] Subjects having a GGGGCC (or G4C2) hexanucleotide expansion in the C9ORF72 gene can present as amylotrophic lateral sclerosis (ALS) or frontotemporal dementia (FTD) even in the same family and, therefore, the neurodegeneration associated with this expansion is referred to herein as “C9orf72 Amyotrophic lateral sclerosis/frontotemporal dementia” or C9orf72 ALS/FTD.” It is an autosomal dominant disease and is the most common form of familial ALS, accounting for about a third of ALS families and 5-10% of sporadic cases in an ALS clinic. It is also a common cause of FTD, explaining about one fourth of familial FTD. Age of symptom onset ranges from 30 to 70 years of age with a mean onset in the late 50s. C9orf72-mediated ALS most often resembles typical ALS, can be bulbar or limb onset, can progress rapidly (though not always) and can be associated with later cognitive symptoms. Thus, C9orf72-mediated ALS is evaluated and treated just as in any ALS patient. The pattern of C9orf72-mediated FTD most commonly is behavioral variant FTD, with the full range of behavioral and cognitive symptoms including disinhibition, apathy and executive dysfunction. Less commonly, C9orf72-mediated FTD presents semantic variant primary progressive aphasia (PPA) or nonfluent variant PPA, and, very rarely, can resemble corticobasal syndrome, progressive supranuclear palsy or an HD-like syndrome. Occasionally parkinsonian features are seen in C9orf72-mediated ALS or FTD.

[0243] Normal G4C2 repeats are ˜25 units or less, and high penetrance disease alleles are typically greater than ˜60 repeat units, ranging up to more than 4,000 units; rarely, repeats between 47 and 60 segregate with disease in families A repeat-primed PCR assay is typically used to detect smaller expansions (<80), but accurately sizing larger repeats requires other techniques (e.g. Southern blot hybridization) that provides an estimate of length.

[0244] Subjects may exhibit frontotemporal lobar degeneration (FTLD) characterized by progressive changes in behavior, executive dysfunction, and/or language impairment. Of the three FTLD clinical syndromes, behavioral variant FTD (bvFTD) is most often, but not exclusively, present. It is characterized by progressive behavioral impairment and a decline in executive function with predominant frontal lobe atrophy on brain MRI. Motor neuron disease, including upper or lower motor neuron dysfunction (or both) that may or may not fulfill criteria for the full ALS phenotype may also be present. Some degree of parkinsonism, which is present in many individuals with C9orf72-related bvFTD, is typically of the akinetic-rigid type without tremor, and is levodopa unresponsive.

[0245] Although the functions of the C9orf72 protein are still being investigated, C9orf72 has been shown to interact with and activate Rab proteins that are involved in regulating the cytoskeleton, autophagy and endocytic transport. In addition, numerous cellular pathways have been demonstrated to be misregulated in neurodegenerative diseases associated with C9orf72 hexanucleotide repeat expansion. For example, altered RNA processing has consistently appeared at the forefront of research into C9orf72 disease. This includes bidirectional transcription of the repeat sequence, accumulation of repeat RNA into nuclear foci sequestering specific RNA-binding proteins (RBPs) and translation of RNA repeats into dipeptide repeat proteins (DPRs) by repeat-associated non-AUG (RAN)-initiated translation. Additionally, disruptions in release of the C9orf72 RNA from RNA polymerase II, translation in the cytoplasm and degradation have been shown to be disrupted by C9orf72 hexanucleotide repeat expansion. Furthermore, several alterations have been identified in the processing of the C9orf72 RNA itself, in terms of its transcription, splicing and localization (see, e.g., Barker, et al., (2017) Frontiers Cell Neurosci 11:1-15).

[0246] Irrespective of the mechanism, several groups have identified the presence of sense and antisense C9orf72-containing foci as well as the presence of aberrant dipeptide-repeat (DPR) proteins (poly(GA), poly(GR), poly(GP), poly(PA), and poly(PR)) produced from all reading frames of either sense or antisense repeat-containing C9orf72 RNAs through repeat-associated non-AUG-dependent (RAN) translation in several cell types in the nervous systems of subjects having C9orf72 ALS/FTD (Lagier-Tourenne, et al. (2013) Proc Natl Acad Sci USA doi/10.1073/pnas.1318835110; Jiang, et al. (2016) Neuron 90:535-550). Furthermore, in mice with one allele of C9orf72 inactivated no disease was provoked but, in mice with both C9orf72 alleles inactivated, splenomegaly, enlarged lymph nodes, and mild social interaction deficits, but no motor dysfunction was observed. In addition, in mice expressing human C9orf72 RNAs with up to 450 GGGGCC repeats (SEQ ID NO: 17) it was shown that hexanucleotide expansions caused age-, repeat-length-, and expression-level-dependent accumulation of sense and antisense RNA-containing foci and dipeptide-repeat proteins synthesized by AUG-independent translation, accompanied by loss of hippocampal neurons, increased anxiety, and impaired cognitive function (Jiang, et al. (2016) Neuron 90:535-550).

[0247] Huntington's disease-like syndromes (HD-like syndromes, or HDL syndromes) are a family of inherited neurodegenerative diseases that closely resemble Huntington's disease (HD) in that they typically produce a combination of chorea, cognitive decline or dementia and behavioural or psychiatric problems. Subjects having HD-like syndromes do not harbor the characteristic repeats in the huntingtin gene that cause that disorder.

[0248] Subjects having Huntington disease-like syndrome due to C9ORF72 expansions are characterized as having movement disorders, including dystonia, chorea, myoclonus, tremor and rigidity. Associated features are also cognitive and memory impairment, early psychiatric disturbances and behavioral problems. The mean age at onset is about 43 years (range 8-60). Early psychiatric and behavioral problems (including depression, apathy, obsessive behaviour, and psychosis) are common. Cognitive symptoms present as executive dysfunction. Movement disorders are prominent: Parkinsonian features and pyramidal features may also be present. A repeat-primed PCR assay is typically used to detect smaller expansions (<80), but accurately sizing larger repeats requires other techniques (e.g. Southern blot hybridization) that provides an estimate of length.

[0249] Fragile X syndrome (FXS) is named after the folate-sensitive fragile site at the FRAXA locus on the X chromosome. The most common cause of inherited mental retardation, FXS typically affects males, varies greatly in severity, and is associated with dysmorphic features including enlarged head, ears and testicles. Scientists were puzzled for years that the risk of FXS increased from one generation to the next. Indeed, this particular example of anticipation carried its own name, the Sherman paradox. The discovery in 1991 that FXS and its underlying fragile site are caused by an expanded CGG repeat that changes size over generations explained the paradox. Normal-sized repeats are polymorphic, ranging from 6 to 52, with repeats at the high end of this range being increasingly prone to further expand (“mutable normal”). In FXS families the repeat sizes span a wide range, from “premutations” of ˜60-200 repeats (typically found in maternal grandfathers) to full mutations of several thousand repeats (found in affected FXS males). The mothers of affected FXS males have variably sized expansions and are prone to premature ovarian failure.

[0250] The molecular mechanism of FXS is a loss of expression of the developmentally important nervous system protein, FMRP. Full expansions promote hypermethylation of the FMR1 promoter and reduce translation of the transcript, effectively silencing expression of the gene.

[0251] Myotonic dystrophy is an autosomal dominant multi-system disease characterized principally by myotonic myopathy. There are two major forms of myotonic dystrophy, both caused by repeat expansions. DM1, also known as Steinert disease, is caused by a CTG expansion in the 3′UTR of the DMPK gene. DM2, which is much less common than DM1 and was previously known as proximal myotonic myopathy, is caused by a CCTG repeat in intron 1 of the CNBP gene (formerly named ZNF9). Despite their similarities, DM1 and DM2 differ in important molecular and clinical respects. Most importantly, DM1 shows robust repeat length/disease severity correlation as well as significant anticipation, whereas DM2 does not.

[0252] DM1 is characterized by progressive weakness and myotonia, often associated with cataracts, cardiac arrhythmias, endocrinopathy and cognitive impairment. The range of severity is broad, with differences in repeat length being the key driver of disease severity. “Mild” disease may manifest simply with premature cataracts and baldness, with electromyographically detectable myotonia. “Classic” disease typically manifests in young adulthood and includes distal weakness, symptomatically and often disabling myotonia, as well as significant cardiac conduction defects in addition to cataracts and baldness. Classic disease, when presenting in teen years, is also known as “juvenile” disease. “Congenital” DM1, in which the affected parent is nearly always the mother, is present at birth. The infant is floppy, facial and jaw muscles are weak resulting in failure to thrive, and mental retardation and development delay are common. Rather than displaying myotonia, congenital DM muscles display features of arrested fiber development. Some unaffected individuals have repeats in the “mutable normal” range of 35-49 repeats. Such metastable alleles are prone to expand when transmitted to the next generation; new mutations in families arise through this process. An important, life-threatening feature of DM1 is cardiac involvement which can lead to sudden cardiac death. Repeat length and cardiac abnormalities also are correlated in DM1.

[0253] DM2 commonly presents as proximal muscle weakness with variable myotonia, hence its former name proximal myotonic myopathy. Like DM1, it too shows marked clinical heterogeneity ranging from mild forms of disease that may be difficult to detect, to profound and disabling proximal muscle weakness. There is no congenital form of disease nor is there apparent anticipation. Cardiac involvement is less common in DM2 than in DM1, but still requires careful monitoring. Whereas in DM1 cognitive impairment is well described, DM2 shows much less cognitive involvement. The CCTG repeat expansion in DM2 is complex, including repeat elements in addition to the CCTG repeat, and is prone to an extreme range of pathogenic expansions, from 75 units to as many as 11,000 units (mean of roughly 5000 repeats).

[0254] The molecular mechanism of disease may be as well worked out for DM1 as it is for any repeat expansion disease. The CTG expansion resides in the 3′UTR of the DMPK transcript, where it does not alter expression of the disease protein, but does form RNA foci and bind to and sequester essential splicing factors. This toxic RNA effect leads to a failure to generate appropriately spliced isoforms of key muscle genes, leading to myotonia and other symptoms of disease. The pathogenic basis of DM2 is less clear, but leading candidates include a toxic RNA effect.

[0255] Numerous diseases (e.g., Huntington disease, Spinal and bulbar muscular atrophy (SBMA), Dentatorubral-pallidoluysian atrophy, Spinocerebellar ataxia type I, Spinocerebellar ataxia type 2, Spinocerebellar ataxia type 3, Spinocerebellar ataxia type 6, Spinocerebellar ataxia type 7, Spinocerebellar ataxia type 8, Spinocerebellar ataxia type 12, and Spinocerebellar ataxia type 17) belong to the CAG/polyglutamine disease group. All, except SBMA which is an X-linked disorder with dominant toxic features, are dominantly inherited disorders. All are classified as rare diseases. HD, the best known among them, is also the most common, with SCA3 next in line. Six are dominantly inherited ataxias (also known as SCAs) including the four most common SCAs among the 40 discovered thus far (SCAs 1,2,3,6). A seventh disorder, DRPLA, can be thought of as a hybrid between SCA and HD. In all nine, the primary pathogenic mechanism is believed to be proteotoxicity emanating from the encoded disease protein. Other than sharing a common glutamine repeat, the various disease proteins are entirely unrelated and serve very different cellular functions. The distinctive clinical and pathological features of individual CAG/polyglutamine diseases are believed to stem primarily from this differing protein context. At least two other repeat expansion diseases may share elements with the polyglutamine diseases: In SCAB, the antisense transcript can encode a polyglutamine protein through RAN translation and the CAG repeat in SCA12 can encode polyglutamine.

[0256] Families with a dominantly inherited disease resembling HD (chorea, cognitive impairment and psychiatric disturbance) may instead have Huntington disease-like 2 (HDL2). This rare phenocopy of HD is caused by a CTG repeat expansion in the Junctophilin-3 (JPH3) gene. Normal repeats are between 6 and 28, whereas expanded repeats are between ˜41 and 58 repeats. Disease typically occurs in midlife and recapitulates many features of HD, with weight loss being a frequent finding. Similar to HD, some individuals with HDL2 can present with juvenile onset disease resembling the Westphal variant of HD (rigidity, parkinsonism, dystonia). The brain MRI often resembles that of HD, showing selective atrophy of the basal ganglia and cortex with relative sparing of the brainstem and cerebellum. The diagnosis of HDL2 cannot be established without molecular genetic testing for the repeat expansion. The pathogenic mechanism remains uncertain and, as with other repeat expansion diseases, may have multiple components. Located in an alternatively spliced exon of the JPH3 gene, the repeat can be transcribed in both directions, leading to CUG (more common) or CAG (less common) repeat-containing transcripts. While a dominant RNA toxic effect may occur, the repeat expansion also reduces levels of the Junctophilin-3 protein, which could prove deleterious to neurons.

[0257] Friedreich ataxia is the most common autosomal recessive ataxia, present primarily in Indian and European populations. Before the disease mutation was discovered, Friedreich ataxia was defined as a young onset progressive ataxia with sensory loss, scoliosis, areflexia and cardiomyopathy occurring before age 25. Other disabling features of disease include hearing loss, motor weakness, and diabetes. The discovery of a GAA repeat expansion in the FRDA gene soon led to the recognition that the classic definition of disease, requiring onset before age 25, was incorrect. While most Friedreich ataxia meets this classic definition, roughly a quarter of individuals develop signs of disease after age 25. Moreover, late onset Friedreich ataxia may not show the classically described areflexia and is less likely to have significant cardiac involvement. Most affected individuals are homozygous for the expansion but a small percentage are compound heterozygotes who have an inactivating or deletion mutation in one allele and an expansion in the other allele. There is robust repeat length-disease correlation, with the size of the smaller of the two expansions showing inverse correlation with age of symptom onset and a direct correlation with the probability of significant cardiac dysfunction. Occasionally, however, disease features can vary widely within a family despite similar sized expansions indicating that other factors influence disease severity beyond the mutation.

[0258] The basis of disease is impairment in mitochondrial function due to loss of frataxin, a protein required for the assembly of iron-sulfur cluster enzymes in the mitochondria. Frataxin fails to be expressed principally because the GAA expansion directly impedes transcription, although a contributing factor is expansion-induced epigenetic silencing of the upstream promotor.

[0259] Unverricht-Lundborg myoclonic epilepsy (EPM1) is the most common cause of myoclonic epilepsy in North America, typically beginning between 6 and 15 years of age and progressing over time. The initial symptom can be either action- or stimulus-induced myoclonus or generalized tonic-clonic seizures, but eventually both are present in affected persons. Ataxia also is a common feature. The EEG shows photosensitive spike and wave abnormalities and the background can be slowed. While cognition is generally normal, mild intellectual deficits may develop over time. The myoclonus is progressive and can be very disabling, leading to wheelchair use for approximately one third of affected individuals.

[0260] This autosomal recessive disease is caused by expansion of a dodecamer repeat in the CSTB gene which encodes the lysosomal protein cystatin B. Normal repeats are 2-3 units in length and expansions range from 30 to ˜125 repeats. Most persons with EPM1 will be homozygous for expansions though a small percentage will have an activating mutation on one allele and an expansion on the other.

[0261] Oculopharyngeal muscular dystrophy (OPMD) is a dominantly inherited neuromuscular disorder characterized by adult onset progressive weakness, ptosis, ophthalmoparesis and dysphagia. The cause is a small GC(N) expansion in the polyadenylate binding protein 2 (PABP2) gene that modestly enlarges a polyalanine tract in the protein. OPMD is one of at least nine polyalanine diseases, the remainder of which are congenital neurocognitive disorders in which the expansions occur in transcription factors. In contrast, OPMD is an adult onset, progressive, degenerative disease. Reminiscent of the CAG/polyglutamine diseases, OPMD is a proteinopathy: the enlarged alanine tract promotes aggregation of the disease protein, resulting in the formation of intranuclear inclusions in skeletal muscle.

[0262] The normal GC(N) repeat length is typically 6 units and expansions are between 8 and 18 in disease. The GC(N) expansions can be either GCG or a mixture of GCG and GCA, both of which encode alanine. A distinctive feature of OPMD is that while most individuals possess a single expanded allele, some affected persons are compound heterozygotes with one allele containing 7 repeats and other 9 repeats. Remarkably, a small percentage of OPMD presents in an autosomal recessive manner wherein affected individuals are homozygous for alleles of 7 repeats. Evidence does not support anticipation in OPMD, but there is some support for a correlation between repeat length and disease severity.

[0263] Fuchs endothelial corneal dystrophy (FECD) is included here among the neurological repeat expansion diseases because it affects vision, is relatively common, and is one of the most recently described repeat expansion diseases. FECD is a degenerative condition characterized by progressive loss of corneal endothelium, thickening of the Descemet's membrane and deposition of extracellular matrix in the cornea. This process results in progressive corneal edema and visual loss, typically after age 60. At least five other genes or genetic loci are associated with FECD, but the most common form—a late onset form—is associated with modest expansion of an intronic CTG repeat in the transcription factor four (TCF4) gene. Normal CTG repeats are between 10 and 37, and pathogenic repeats are greater than 50. Little is known about how the expansion contributes to disease, but the current leading hypothesis is a toxic RNA effect.

[0264] “Therapeutically effective amount,” as used herein, is intended to include the amount of an RNAi agent that, when administered to a subject having an RPS25-associated disease, is sufficient to effect treatment of the disease (e.g., by diminishing, ameliorating, or maintaining the existing disease or one or more symptoms of disease). The “therapeutically effective amount” may vary depending on the RNAi agent, how the agent is administered, the disease and its severity and the history, age, weight, family history, genetic makeup, the types of preceding or concomitant treatments, if any, and other individual characteristics of the subject to be treated.

[0265] “Prophylactically effective amount,” as used herein, is intended to include the amount of a RNAi agent that, when administered to a subject having an RPS25-associated disorder, is sufficient to prevent or ameliorate the disease or one or more symptoms of the disease. Ameliorating the disease includes slowing the course of the disease or reducing the severity of later-developing disease. The “prophylactically effective amount” may vary depending on the RNAi agent, how the agent is administered, the degree of risk of disease, and the history, age, weight, family history, genetic makeup, the types of preceding or concomitant treatments, if any, and other individual characteristics of the patient to be treated.

[0266] A “therapeutically-effective amount” or “prophylacticaly effective amount” also includes an amount of a RNAi agent that produces some desired local or systemic effect at a reasonable benefit/risk ratio applicable to any treatment. A RNAi agent employed in the methods of the present disclosure may be administered in a sufficient amount to produce a reasonable benefit/risk ratio applicable to such treatment.

[0267] The phrase “pharmaceutically acceptable” is employed herein to refer to those compounds, materials, compositions, or dosage forms which are, within the scope of sound medical judgment, suitable for use in contact with the tissues of human subjects and animal subjects without excessive toxicity, irritation, allergic response, or other problem or complication, commensurate with a reasonable benefit/risk ratio.

[0268] The phrase “pharmaceutically-acceptable carrier” as used herein means a pharmaceutically-acceptable material, composition or vehicle, such as a liquid or solid filler, diluent, excipient, manufacturing aid (e.g., lubricant, talc magnesium, calcium or zinc stearate, or steric acid), or solvent encapsulating material, involved in carrying or transporting the subject compound from one organ, or portion of the body, to another organ, or portion of the body. Each carrier must be “acceptable” in the sense of being compatible with the other ingredients of the formulation and not injurious to the subject being treated. Some examples of materials which can serve as pharmaceutically-acceptable carriers include: (1) sugars, such as lactose, glucose and sucrose; (2) starches, such as corn starch and potato starch; (3) cellulose, and its derivatives, such as sodium carboxymethyl cellulose, ethyl cellulose and cellulose acetate; (4) powdered tragacanth; (5) malt; (6) gelatin; (7) lubricating agents, such as magnesium state, sodium lauryl sulfate and talc; (8) excipients, such as cocoa butter and suppository waxes; (9) oils, such as peanut oil, cottonseed oil, safflower oil, sesame oil, olive oil, corn oil and soybean oil; (10) glycols, such as propylene glycol; (11) polyols, such as glycerin, sorbitol, mannitol and polyethylene glycol; (12) esters, such as ethyl oleate and ethyl laurate; (13) agar; (14) buffering agents, such as magnesium hydroxide and aluminum hydroxide; (15) alginic acid; (16) pyrogen-free water; (17) isotonic saline; (18) Ringer's solution; (19) ethyl alcohol; (20) pH buffered solutions; (21) polyesters, polycarbonates or polyanhydrides; (22) bulking agents, such as polypeptides and amino acids (23) serum component, such as serum albumin, HDL and LDL; and (22) other non-toxic compatible substances employed in pharmaceutical formulations.

[0269] The term “sample,” as used herein, includes a collection of similar fluids, cells, or tissues isolated from a subject, as well as fluids, cells, or tissues present within a subject. Examples of biological fluids include blood, serum and serosal fluids, plasma, cerebrospinal fluid, ocular fluids, lymph, urine, saliva, and the like. Tissue samples may include samples from tissues, organs or localized regions. For example, samples may be derived from particular organs, parts of organs, or fluids or cells within those organs. In certain embodiments, samples may be derived from the brain (e.g., whole brain or certain segments of brain, e.g., striatum, or certain types of cells in the brain, such as, e.g., neurons and glial cells (astrocytes, oligodendrocytes, microglial cells)). In some embodiments, a “sample derived from a subject” refers to blood drawn from the subject or plasma or serum derived therefrom. In further embodiments, a “sample derived from a subject” refers to brain tissue (or subcomponents thereof) or retinal tissue (or subcomponents thereof) derived from the subject.

### II. RNAi Agents of the Disclosure

[0270] Described herein are RNAi agents which inhibit the expression of an RPS25 gene. In one embodiment, the RNAi agent includes double stranded ribonucleic acid (dsRNA) molecules for inhibiting the expression of an RPS25 gene in a cell, such as a cell within a subject, e.g., a mammal, such as a human having an RPS25-associated disease, e.g., a nucleotide repeat expansion disease, e.g., C9orf72 ALS/FTD, Huntington-Like Syndrome Due To C9orf72 Expansions, Fragile X syndrome (FXS), Myotonic dystrophy (i.e., DM1, and DM2), CAG/polyglutamine disease (e.g., Huntington's disease, Spinal and bulbar muscular atrophy (SBMA), Dentatorubral-pallidoluysian atrophy, Spinocerebellar ataxia type I, Spinocerebellar ataxia type 2, Spinocerebellar ataxia type 3, Spinocerebellar ataxia type 6, Spinocerebellar ataxia type 7, Spinocerebellar ataxia type 8, Spinocerebellar ataxia type 12, and Spinocerebellar ataxia type 17), Friedreich ataxia, Unverricht-Lundborg myoclonic epilepsy (EPM1), Oculopharyngeal muscular dystrophy (OPMD), and Fuchs endothelial corneal dystrophy (FECD). The dsRNA includes an antisense strand having a region of complementarity which is complementary to at least a part of an mRNA formed in the expression of an RPS25 gene, The region of complementarity is about 15-30 nucleotides or less in length. Upon contact with a cell expressing the RPS25 gene, the RNAi agent inhibits the expression of the RPS25 gene (e.g., a human gene, a primate gene, a non-primate gene) by at least 50% as assayed by, for example, a PCR or branched DNA (bDNA)-based method, or by a protein-based method, such as by immunofluorescence analysis, using, for example, western blotting or flowcytometric techniques. In a preferred embodiment, the level of knockdown is assayed at a 10 nM concentration of siRNA in human neuroblastoma BE(2)-C cells using a Dual-Luciferase assay method provided in Example 2 below.

[0271] A dsRNA includes two RNA strands that are complementary and hybridize to form a duplex structure under conditions in which the dsRNA will be used. One strand of a dsRNA (the antisense strand) includes a region of complementarity that is substantially complementary, and generally fully complementary, to a target sequence. The target sequence can be derived from the sequence of an mRNA formed during the expression of an RPS25 gene. The other strand (the sense strand) includes a region that is complementary to the antisense strand, such that the two strands hybridize and form a duplex structure when combined under suitable conditions. As described elsewhere herein and as known in the art, the complementary sequences of a dsRNA can also be contained as self-complementary regions of a single nucleic acid molecule, as opposed to being on separate oligonucleotides.

[0272] Generally, the duplex structure is 15 to 30 base pairs in length, e.g., 15-29, 15-28, 15-27, 15-26, 15-25, 15-24, 15-23, 15-22, 15-21, 15-20, 15-19, 15-18, 15-17, 18-30, 18-29, 18-28, 18-27, 18-26, 18-25, 18-24, 18-23, 18-22, 18-21, 18-20, 19-30, 19-29, 19-28, 19-27, 19-26, 19-25, 19-24, 19-23, 19-22, 19-21, 19-20, 20-30, 20-29, 20-28, 20-27, 20-26, 20-25, 20-24,20-23, 20-22, 20-21, 21-30, 21-29, 21-28, 21-27, 21-26, 21-25, 21-24, 21-23, or 21-22 base pairs in length. In certain preferred embodiments, the duplex structure is 18 to 25 base pairs in length, e.g., 18-25, 18-24, 18-23, 18-22, 18-21, 18-20, 19-25, 19-24, 19-23, 19-22, 19-21, 19-20, 20-25, 20-24,20-23, 20-22, 20-21, 21-25, 21-24, 21-23, 21-22, 22-25, 22-24, 22-23, 23-25, 23-24 or 24-25 base pairs in length, for example, 19-21 basepairs in length. Ranges and lengths intermediate to the above recited ranges and lengths are also contemplated to be part of the disclosure.

[0273] Similarly, the region of complementarity to the target sequence is 15 to 30 nucleotides in length, e.g., 15-29, 15-28, 15-27, 15-26, 15-25, 15-24, 15-23, 15-22, 15-21, 15-20, 15-19, 15-18, 15-17, 18-30, 18-29, 18-28, 18-27, 18-26, 18-25, 18-24, 18-23, 18-22, 18-21, 18-20, 19-30, 19-29, 19-28, 19-27, 19-26, 19-25, 19-24, 19-23, 19-22, 19-21, 19-20, 20-30, 20-29, 20-28, 20-27, 20-26, 20-25, 20-24,20-23, 20-22, 20-21, 21-30, 21-29, 21-28, 21-27, 21-26, 21-25, 21-24, 21-23, or 21-22 nucleotides in length, for example 19-23 nucleotides in length or 21-23 nucleotides in length. Ranges and lengths intermediate to the above recited ranges and lengths are also contemplated to be part of the disclosure.

[0274] In some embodiments, the dsRNA is 15 to 23 nucleotides in length, or 25 to 30 nucleotides in length. In general, the dsRNA is long enough to serve as a substrate for the Dicer enzyme. For example, it is well known in the art that dsRNAs longer than about 21-23 nucleotides can serve as substrates for Dicer. As the ordinarily skilled person will also recognize, the region of an RNA targeted for cleavage will most often be part of a larger RNA molecule, often an mRNA molecule. Where relevant, a “part” of an mRNA target is a contiguous sequence of an mRNA target of sufficient length to allow it to be a substrate for RNAi-directed cleavage (i.e., cleavage through a RISC pathway).

[0275] One of skill in the art will also recognize that the duplex region is a primary functional portion of a dsRNA, e.g., a duplex region of about 15 to 36 base pairs, e.g., 15-36, 15-35, 15-34, 15-33, 15-32, 15-31, 15-30, 15-29, 15-28, 15-27, 15-26, 15-25, 15-24, 15-23, 15-22, 15-21, 15-20, 15-19, 15-18, 15-17, 18-30, 18-29, 18-28, 18-27, 18-26, 18-25, 18-24, 18-23, 18-22, 18-21, 18-20, 19-30, 19-29, 19-28, 19-27, 19-26, 19-25, 19-24, 19-23, 19-22, 19-21, 19-20, 20-30, 20-29, 20-28, 20-27, 20-26, 20-25, 20-24,20-23, 20-22, 20-21, 21-30, 21-29, 21-28, 21-27, 21-26, 21-25, 21-24, 21-23, or 21-22 base pairs, for example, 19-21 base pairs. Thus, in one embodiment, to the extent that it becomes processed to a functional duplex, of e.g., 15-30 base pairs, that targets a desired RNA for cleavage, an RNA molecule or complex of RNA molecules having a duplex region greater than 30 base pairs is a dsRNA. Thus, an ordinarily skilled artisan will recognize that in one embodiment, a miRNA is a dsRNA. In another embodiment, a dsRNA is not a naturally occurring miRNA. In another embodiment, a RNAi agent useful to target RPS25 expression is not generated in the target cell by cleavage of a larger dsRNA.

[0276] A dsRNA as described herein can further include one or more single-stranded nucleotide overhangs e.g., 1, 2, 3, or 4 nucleotides. A nucleotide overhang can comprise or consist of a nucleotide/nucleoside analog, including a deoxynucleotide/nucleoside. The overhang(s) can be on the sense strand, the antisense strand or any combination thereof. Furthermore, the nucleotide(s) of an overhang can be present on the 5′-end, 3′-end or both ends of either an antisense or sense strand of a dsRNA.

[0277] A dsRNA can be synthesized by standard methods known in the art.

[0278] In one aspect, a dsRNA of the disclosure includes at least two nucleotide sequences, a sense sequence and an antisense sequence. The sense strand sequence for RPS25 may be selected from the group of sequences provided in any one of Tables 2-14, and the corresponding nucleotide sequence of the antisense strand of the sense strand may be selected from the group of sequences of any one of Tables 2-14. In this aspect, one of the two sequences is complementary to the other of the two sequences, with one of the sequences being substantially complementary to a sequence of an mRNA generated in the expression of an RPS25 gene. As such, in this aspect, a dsRNA will include two oligonucleotides, where one oligonucleotide is described as the sense strand (passenger strand) in any one of Tables 2-14, and the second oligonucleotide is described as the corresponding antisense strand (guide strand) of the sense strand in any one of Tables 2-14 for RPS25.

[0279] In one embodiment, the substantially complementary sequences of the dsRNA are contained on separate oligonucleotides. In another embodiment, the substantially complementary sequences of the dsRNA are contained on a single oligonucleotide.

[0280] It will be understood that, although the sequences in Tables 3, 5, 7, 9, 11, 12, and 14 are described as modified or conjugated sequences, the RNA of the RNAi agent of the disclosure e.g., a dsRNA of the disclosure, may comprise any one of the sequences set forth in any one of Tables 2-14 that is un-modified, un-conjugated, or modified or conjugated differently than described therein. For example, the modified sequences provided in Tables 3, 5, 7, 9, 11, and 12 may not require a dT. A lipophilic ligand can be included in any of the positions provided in the instant application.

[0281] The skilled person is well aware that dsRNAs having a duplex structure of about 20 to 23 base pairs, e.g., 21, base pairs have been hailed as particularly effective in inducing RNA interference (Elbashir et al., (2001) EMBO J., 20:6877-6888). However, others have found that shorter or longer RNA duplex structures can also be effective (Chu and Rana (2007) RNA 14:1714-1719; Kim et al. (2005) Nat Biotech 23:222-226). In the embodiments described above, by virtue of the nature of the oligonucleotide sequences provided herein, dsRNAs described herein can include at least one strand of a length of minimally 21 nucleotides. It can be reasonably expected that shorter duplexes minus only a few nucleotides on one or both ends can be similarly effective as compared to the dsRNAs described above. Hence, dsRNAs having a sequence of at least 15, 16, 17, 18, 19, 20, or more contiguous nucleotides derived from one of the sequences provided herein, and differing in their ability to inhibit the expression of an RPS25 gene by not more than 10, 15, 20, 25, or 30% inhibition from a dsRNA comprising the full sequence using the in vitro assay with Cos7 and a 10 nM concentration of the RNA agent and the PCR assay as provided in the examples herein, are contemplated to be within the scope of the present disclosure.

[0282] In addition, the RNAs described herein identify a site(s) in an RPS25 transcript that is susceptible to RISC-mediated cleavage. As such, the present disclosure further features RNAi agents that target within this site(s). As used herein, a RNAi agent is said to target within a particular site of an RNA transcript if the RNAi agent promotes cleavage of the transcript anywhere within that particular site. Such a RNAi agent will generally include at least about 15 contiguous nucleotides, preferably at least 19 nucleotides, from one of the sequences provided herein coupled to additional nucleotide sequences taken from the region contiguous to the selected sequence in an RPS25 gene.

[0283] A RNAi agent as described herein can contain one or more mismatches to the target sequence. In one embodiment, a RNAi agent as described herein contains no more than 3 mismatches (i.e., 3, 2, 1, or 0 mismatches). In one embodiment, a RNAi agent as described herein contains no more than 2 mismatches. In one embodiment, a RNAi agent as described herein contains no more than 1 mismatch. In one embodiment, a RNAi agent as described herein contains 0 mismatches. In certain embodiments, if the antisense strand of the RNAi agent contains mismatches to the target sequence, the mismatch can optionally be restricted to be within the last 5 nucleotides from either the 5′- or 3′-end of the region of complementarity. For example, in such embodiments, for a 23 nucleotide RNAi agent, the strand which is complementary to a region of an RPS25 gene, generally does not contain any mismatch within the central 13 nucleotides. The methods described herein or methods known in the art can be used to determine whether a RNAi agent containing a mismatch to a target sequence is effective in inhibiting the expression of an RPS25 gene. Consideration of the efficacy of RNAi agents with mismatches in inhibiting expression of an RPS25 gene is important, especially if the particular region of complementarity in an RPS25 gene is known to have polymorphic sequence variation within the population.

### III. Modified RNAi Agents of the Disclosure

[0284] In one embodiment, the RNA of the RNAi agent of the disclosure e.g., a dsRNA, is un-modified, and does not comprise, e.g., chemical modifications or conjugations known in the art and described herein. In preferred embodiments, the RNA of a RNAi agent of the disclosure, e.g., a dsRNA, is chemically modified to enhance stability or other beneficial characteristics. In certain embodiments of the disclosure, substantially all of the nucleotides of a RNAi agent of the disclosure are modified. In other embodiments of the disclosure, all of the nucleotides of a RNAi agent of the disclosure are modified. RNAi agents of the disclosure in which “substantially all of the nucleotides are modified” are largely but not wholly modified and can include not more than 5, 4, 3, 2, or 1 unmodified nucleotides. In still other embodiments of the disclosure, RNAi agents of the disclosure can include not more than 5, 4, 3, 2 or 1 modified nucleotides.

[0285] The nucleic acids featured in the disclosure can be synthesized or modified by methods well established in the art, such as those described in “Current protocols in nucleic acid chemistry,” Beaucage, S. L. et al. (Edrs.), John Wiley & Sons, Inc., New York, N.Y., USA, which is hereby incorporated herein by reference. Modifications include, for example, end modifications, e.g., 5′-end modifications (phosphorylation, conjugation, inverted linkages) or 3′-end modifications (conjugation, DNA nucleotides, inverted linkages, etc.); base modifications, e.g., replacement with stabilizing bases, destabilizing bases, or bases that base pair with an expanded repertoire of partners, removal of bases (abasic nucleotides), or conjugated bases; sugar modifications (e.g., at the 2′-position or 4′-position) or replacement of the sugar; or backbone modifications, including modification or replacement of the phosphodiester linkages. Specific examples of RNAi agents useful in the embodiments described herein include, but are not limited to, RNAs containing modified backbones or no natural internucleoside linkages. RNAs having modified backbones include, among others, those that do not have a phosphorus atom in the backbone. For the purposes of this specification, and as sometimes referenced in the art, modified RNAs that do not have a phosphorus atom in their internucleoside backbone can also be considered to be oligonucleosides. In some embodiments, a modified RNAi agent will have a phosphorus atom in its internucleoside backbone.

[0286] Modified RNA backbones include, for example, phosphorothioates, chiral phosphorothioates, phosphorodithioates, phosphotriesters, aminoalkylphosphotriesters, methyl and other alkyl phosphonates including 3′-alkylene phosphonates and chiral phosphonates, phosphinates, phosphoramidates including 3′-amino phosphoramidate and aminoalkylphosphoramidates, thionophosphoramidates, thionoalkylphosphonates, thionoalkylphosphotriesters, and boranophosphates having normal 3′-5′ linkages, 2′-5′-linked analogs of these, and those having inverted polarity wherein the adjacent pairs of nucleoside units are linked 3′-5′ to 5′-3′ or 2′-5′ to 5′-2′. Various salts, mixed salts and free acid forms are also included.

[0287] Representative U.S. patents that teach the preparation of the above phosphorus-containing linkages include, but are not limited to, U.S. Pat. Nos. 3,687,808; 4,469,863; 4,476,301; 5,023,243; 5,177,195; 5,188,897; 5,264,423; 5,276,019; 5,278,302; 5,286,717; 5,321,131; 5,399,676; 5,405,939; 5,453,496; 5,455,233; 5,466,677; 5,476,925; 5,519,126; 5,536,821; 5,541,316; 5,550,111; 5,563,253; 5,571,799; 5,587,361; 5,625,050; 6,028,188; 6,124,445; 6,160,109; 6,169,170; 6,172,209; 6,239,265; 6,277,603; 6,326,199; 6,346,614; 6,444,423; 6,531,590; 6,534,639; 6,608,035; 6,683,167; 6,858,715; 6,867,294; 6,878,805; 7,015,315; 7,041,816; 7,273,933; 7,321,029; and U.S. Pat. RE39464, the entire contents of each of which are hereby incorporated herein by reference.

[0288] Modified RNA backbones that do not include a phosphorus atom therein have backbones that are formed by short chain alkyl or cycloalkyl internucleoside linkages, mixed heteroatoms and alkyl or cycloalkyl internucleoside linkages, or one or more short chain heteroatomic or heterocyclic internucleoside linkages. These include those having morpholino linkages (formed in part from the sugar portion of a nucleoside); siloxane backbones; sulfide, sulfoxide and sulfone backbones; formacetyl and thioformacetyl backbones; methylene formacetyl and thioformacetyl backbones; alkene containing backbones; sulfamate backbones; methyleneimino and methylenehydrazino backbones; sulfonate and sulfonamide backbones; amide backbones; and others having mixed N, O, S and CH₂ component parts.

[0289] Representative U.S. patents that teach the preparation of the above oligonucleosides include, but are not limited to, U.S. Pat. Nos. 5,034,506; 5,166,315; 5,185,444; 5,214,134; 5,216,141; 5,235,033; 5,64,562; 5,264,564; 5,405,938; 5,434,257; 5,466,677; 5,470,967; 5,489,677; 5,541,307; 5,561,225; 5,596,086; 5,602,240; 5,608,046; 5,610,289; 5,618,704; 5,623,070; 5,663,312; 5,633,360; 5,677,437; and, 5,677,439, the entire contents of each of which are hereby incorporated herein by reference.

[0290] In other embodiments, suitable RNA mimetics are contemplated for use in RNAi agents, in which both the sugar and the internucleoside linkage, i.e., the backbone, of the nucleotide units are replaced with novel groups. The base units are maintained for hybridization with an appropriate nucleic acid target compound. One such oligomeric compound, a RNA mimetic that has been shown to have excellent hybridization properties, is referred to as a peptide nucleic acid (PNA). In PNA compounds, the sugar backbone of a RNA is replaced with an amide containing backbone, in particular an aminoethylglycine backbone. The nucleobases are retained and are bound directly or indirectly to aza nitrogen atoms of the amide portion of the backbone. Representative U.S. patents that teach the preparation of PNA compounds include, but are not limited to, U.S. Pat. Nos. 5,539,082; 5,714,331; and 5,719,262, the entire contents of each of which are hereby incorporated herein by reference. Additional PNA compounds suitable for use in the RNAi agents of the disclosure are described in, for example, in Nielsen et al., Science, 1991, 254, 1497-1500.

[0291] Some embodiments featured in the disclosure include RNAs with phosphorothioate backbones and oligonucleosides with heteroatom backbones, and in particular —CH₂—NH—CH₂—, —CH₂—N(CH₃)—O—CH₂— [known as a methylene (methylimino) or MMI backbone], —CH₂—O—N(CH₃)—CH₂—, —CH₂—N(CH₃)—N(CH₃)—CH₂—and —N(CH₃)—CH₂—CH₂— [wherein the native phosphodiester backbone is represented as —O—P—O—CH₂—] of the above-referenced U.S. Pat. No. 5,489,677, and the amide backbones of the above-referenced U.S. Pat. No. 5,602,240. In some embodiments, the RNAs featured herein have morpholino backbone structures of the above-referenced U.S. Pat. No. 5,034,506.

[0292] Modified RNAs can also contain one or more substituted sugar moieties. The RNAi agents, e.g., dsRNAs, featured herein can include one of the following at the 2′-position: OH; F; O-, S-, or N-alkyl; O-, S-, or N-alkenyl; O-, S- or N-alkynyl; or O-alkyl-O-alkyl, wherein the alkyl, alkenyl and alkynyl can be substituted or unsubstituted C₁ to C₁₀ alkyl or C₂ to C₁₀ alkenyl and alkynyl. Exemplary suitable modifications include O[(CH₂)ₙO]ₘCH₃, O(CH₂).ₙOCH₃, O(CH₂)ₙNH₂, O(CH₂)ₙCH₃, O(CH₂)ₙONH₂, and O(CH₂)ₙ[(CH₂)ₙCH₃)]₂, where n and m are from 1 to about 10. In other embodiments, dsRNAs include one of the following at the 2′ position: C₁ to C₁₀ lower alkyl, substituted lower alkyl, alkaryl, aralkyl, O-alkaryl or O-aralkyl, SH, SCH₃, OCN, Cl, Br, CN, CF₃, OCF₃, SOCH₃, SO₂CH₃, ONO₂, NO₂, N₃, NH₂, heterocycloalkyl, heterocycloalkaryl, aminoalkylamino, polyalkylamino, substituted silyl, an RNA cleaving group, a reporter group, an intercalator, a group for improving the pharmacokinetic properties of a RNAi agent, or a group for improving the pharmacodynamic properties of a RNAi agent, and other substituents having similar properties. In some embodiments, the modification includes a 2′-methoxyethoxy (2′-O—CH₂CH₂OCH₃, also known as 2′-O-(2-methoxyethyl) or 2′-MOE) (Martin et al., Helv. Chim. Acta, 1995, 78:486-504) i.e., an alkoxy-alkoxy group. Another exemplary modification is 2′-dimethylaminooxyethoxy, i.e., a O(CH₂)₂ON(CH₃)₂ group, also known as 2′-DMAOE, as described in examples herein below, and 2′-dimethylaminoethoxyethoxy (also known in the art as 2′-O-dimethylaminoethoxyethyl or 2′-DMAEOE), i.e., 2′-O—CH₂—O—CH₂—N(CH₂)₂. Further exemplary modifications include: 5′-Me-2′-F nucleotides, 5′-Me-2′-OMe nucleotides, 5′-Me-2′-deoxynucleotides, (both R and S isomers in these three families); 2′-alkoxyalkyl; and 2′-NMA (N-methylacetamide).

[0293] Other modifications include 2′-methoxy (2′-OCH₃), 2′-aminopropoxy (2′-OCH₂CH₂CH₂NH₂), 2′-O-hexadecyl, and 2′-fluoro (2′-F). Similar modifications can also be made at other positions on the RNA of a RNAi agent, particularly the 3′ position of the sugar on the 3′ terminal nucleotide or in 2′-5′ linked dsRNAs and the 5′ position of 5′ terminal nucleotide. RNAi agents can also have sugar mimetics such as cyclobutyl moieties in place of the pentofuranosyl sugar. Representative U.S. patents that teach the preparation of such modified sugar structures include, but are not limited to, U.S. Pat. Nos. 4,981,957; 5,118,800; 5,319,080; 5,359,044; 5,393,878; 5,446,137; 5,466,786; 5,514,785; 5,519,134; 5,567,811; 5,576,427; 5,591,722; 5,597,909; 5,610,300; 5,627,053; 5,639,873; 5,646,265; 5,658,873; 5,670,633; and 5,700,920, certain of which are commonly owned with the instant application. The entire contents of each of the foregoing are hereby incorporated herein by reference.

[0294] A RNAi agent of the disclosure can also include nucleobase (often referred to in the art simply as “base”) modifications or substitutions. As used herein, “unmodified” or “natural” nucleobases include the purine bases adenine (A) and guanine (G), and the pyrimidine bases thymine (T), cytosine (C) and uracil (U). Modified nucleobases include other synthetic and natural nucleobases such as 5-methylcytosine (5-me-C), 5-hydroxymethyl cytosine, xanthine, hypoxanthine, 2-aminoadenine, 6-methyl and other alkyl derivatives of adenine and guanine, 2-propyl and other alkyl derivatives of adenine and guanine, 2-thiouracil, 2-thiothymine and 2-thiocytosine, 5-halouracil and cytosine, 5-propynyl uracil and cytosine, 6-azo uracil, cytosine and thymine, 5-uracil (pseudouracil), 4-thiouracil, 8-halo, 8-amino, 8-thiol, 8-thioalkyl, 8-hydroxyl anal other 8-substituted adenines and guanines, 5-halo, particularly 5-bromo, 5-trifluoromethyl and other 5-substituted uracils and cytosines, 7-methylguanine and 7-methyladenine, 8-azaguanine and 8-azaadenine, 7-deazaguanine and 7-daazaadenine and 3-deazaguanine and 3-deazaadenine. Further nucleobases include those disclosed in U.S. Pat. No. 3,687,808, those disclosed in Modified Nucleosides in Biochemistry, Biotechnology and Medicine, Herdewijn, P. ed. Wiley-VCH, 2008; those disclosed in The Concise Encyclopedia Of Polymer Science And Engineering, pages 858-859, Kroschwitz, J. L, ed. John Wiley & Sons, 1990, these disclosed by Englisch et al., (1991) Angewandte Chemie, International Edition, 30:613, and those disclosed by Sanghvi, Y S., Chapter 15, dsRNA Research and Applications, pages 289-302, Crooke, S. T. and Lebleu, B., Ed., CRC Press, 1993. Certain of these nucleobases are particularly useful for increasing the binding affinity of the oligomeric compounds featured in the disclosure. These include 5-substituted pyrimidines, 6-azapyrimidines and N-2, N-6 and 0-6 substituted purines, including 2-aminopropyladenine, 5-propynyluracil and 5-propynylcytosine. 5-methylcytosine substitutions have been shown to increase nucleic acid duplex stability by 0.6-1.2° C. (Sanghvi, Y. S., Crooke, S. T. and Lebleu, B., Eds., dsRNA Research and Applications, CRC Press, Boca Raton, 1993, pp. 276-278) and are exemplary base substitutions, even more particularly when combined with 2′-O-methoxyethyl sugar modifications.

[0295] Representative U.S. patents that teach the preparation of certain of the above noted modified nucleobases as well as other modified nucleobases include, but are not limited to, the above noted U.S. Pat. Nos. 3,687,808, 4,845,205; 5,130,30; 5,134,066; 5,175,273; 5,367,066; 5,432,272; 5,457,187; 5,459,255; 5,484,908; 5,502,177; 5,525,711; 5,552,540; 5,587,469; 5,594,121, 5,596,091; 5,614,617; 5,681,941; 5,750,692; 6,015,886; 6,147,200; 6,166,197; 6,222,025; 6,235,887; 6,380,368; 6,528,640; 6,639,062; 6,617,438; 7,045,610; 7,427,672; and 7,495,088, the entire contents of each of which are hereby incorporated herein by reference.

[0296] A RNAi agent of the disclosure can also be modified to include one or more locked nucleic acids (LNA). A locked nucleic acid is a nucleotide having a modified ribose moiety in which the ribose moiety comprises an extra bridge connecting the 2′ and 4′ carbons. This structure effectively “locks” the ribose in the 3′-endo structural conformation. The addition of locked nucleic acids to siRNAs has been shown to increase siRNA stability in serum, and to reduce off-target effects (Elmen, J. et al., (2005) Nucleic Acids Research 33(1):439-447; Mook, O R. et al., (2007) Mol Canc Ther 6(3):833-843; Grunweller, A. et al., (2003) Nucleic Acids Research 31(12):3185-3193).

[0297] A RNAi agent of the disclosure can also be modified to include one or more bicyclic sugar moities. A “bicyclic sugar” is a furanosyl ring modified by the bridging of two atoms. A “bicyclic nucleoside” (“BNA”) is a nucleoside having a sugar moiety comprising a bridge connecting two carbon atoms of the sugar ring, thereby forming a bicyclic ring system. In certain embodiments, the bridge connects the 4′-carbon and the 2′-carbon of the sugar ring. Thus, in some embodiments an agent of the disclosure may include one or more locked nucleic acids (LNA). A locked nucleic acid is a nucleotide having a modified ribose moiety in which the ribose moiety comprises an extra bridge connecting the 2′ and 4′ carbons. In other words, an LNA is a nucleotide comprising a bicyclic sugar moiety comprising a 4′-CH2-O-2′ bridge. This structure effectively “locks” the ribose in the 3′-endo structural conformation. The addition of locked nucleic acids to siRNAs has been shown to increase siRNA stability in serum, and to reduce off-target effects (Elmen, J. et al., (2005) Nucleic Acids Research 33(1):439-447; Mook, O R. et al., (2007) Mol Canc Ther 6(3):833-843; Grunweller, A. et al., (2003) Nucleic Acids Research 31(12):3185-3193). Examples of bicyclic nucleosides for use in the polynucleotides of the disclosure include without limitation nucleosides comprising a bridge between the 4′ and the 2′ ribosyl ring atoms. In certain embodiments, the antisense polynucleotide agents of the disclosure include one or more bicyclic nucleosides comprising a 4′ to 2′ bridge. Examples of such 4′ to 2′ bridged bicyclic nucleosides, include but are not limited to 4′-(CH2)-O-2′ (LNA); 4′-(CH2)-S-2′; 4′-(CH2)₂—O-2′ (ENA); 4′-CH(CH3)-O-2′ (also referred to as “constrained ethyl” or “cEt”) and 4′-CH(CH2OCH3)-O-2′ (and analogs thereof; see, e.g., U.S. Pat. No. 7,399,845); 4′-C(CH3)(CH3)-O-2′ (and analogs thereof; see e.g., U.S. Pat. No. 8,278,283); 4′-CH2-N(OCH3)-2′ (and analogs thereof; see e.g., U.S. Pat. No. 8,278,425); 4′-CH2-O—N(CH3)-2′ (see, e.g., U.S. Patent Publication No. 2004/0171570); 4′-CH2-N(R)—O-2′, wherein R is H, C1-C12 alkyl, or a protecting group (see, e.g., U.S. Pat. No. 7,427,672); 4′-CH2-C(H)(CH3)-2′ (see, e.g., Chattopadhyaya et al., J. Org. Chem., 2009, 74, 118-134); and 4′-CH2-C(═CH2)-2′ (and analogs thereof; see, e.g., U.S. Pat. No. 8,278,426). The entire contents of each of the foregoing are hereby incorporated herein by reference.

[0298] Additional representative US Patents and US Patent Publications that teach the preparation of locked nucleic acid nucleotides include, but are not limited to, the following: U.S. Pat. Nos. 6,268,490; 6,525,191; 6,670,461; 6,770,748; 6,794,499; 6,998,484; 7,053,207; 7,034,133; 7,084,125; 7,399,845; 7,427,672; 7,569,686; 7,741,457; 8,022,193; 8,030,467; 8,278,425; 8,278,426; 8,278,283; US 2008/0039618; and US 2009/0012281, the entire contents of each of which are hereby incorporated herein by reference.

[0299] Any of the foregoing bicyclic nucleosides can be prepared having one or more stereochemical sugar configurations including for example α-L-ribofuranose and β-D-ribofuranose (see WO 99/14226).

[0300] A RNAi agent of the disclosure can also be modified to include one or more constrained ethyl nucleotides. As used herein, a “constrained ethyl nucleotide” or “cEt” is a locked nucleic acid comprising a bicyclic sugar moiety comprising a 4′-CH(CH3)-O-2′ bridge. In one embodiment, a constrained ethyl nucleotide is in the S conformation referred to herein as “S-cEt.”

[0301] A RNAi agent of the disclosure may also include one or more “conformationally restricted nucleotides” (“CRN”). CRN are nucleotide analogs with a linker connecting the C2′ and C4′ carbons of ribose or the C3 and —C5′ carbons of ribose. CRN lock the ribose ring into a stable conformation and increase the hybridization affinity to mRNA. The linker is of sufficient length to place the oxygen in an optimal position for stability and affinity resulting in less ribose ring puckering.

[0302] Representative publications that teach the preparation of certain of the above noted CRN include, but are not limited to, US 2013/0190383; and WO 2013/036868, the entire contents of each of which are hereby incorporated herein by reference.

[0303] In some embodiments, a RNAi agent of the disclosure comprises one or more monomers that are UNA (unlocked nucleic acid) nucleotides. UNA is unlocked acyclic nucleic acid, wherein any of the bonds of the sugar has been removed, forming an unlocked “sugar” residue. In one example, UNA also encompasses monomer with bonds between C1′-C4′ have been removed (i.e. the covalent carbon-oxygen-carbon bond between the C1′ and C4′ carbons). In another example, the C2′-C3′ bond (i.e. the covalent carbon-carbon bond between the C2′ and C3′ carbons) of the sugar has been removed (see Nuc. Acids Symp. Series, 52, 133-134 (2008) and Fluiter et al., Mol. Biosyst., 2009, 10, 1039 hereby incorporated by reference).

[0304] Representative U.S. publications that teach the preparation of UNA include, but are not limited to, U.S. Pat. No. 8,314,227; and US Patent Publication Nos. 2013/0096289; 2013/0011922; and 2011/0313020, the entire contents of each of which are hereby incorporated herein by reference.

[0305] Potentially stabilizing modifications to the ends of RNA molecules can include N-(acetylaminocaproyl)-4-hydroxyprolinol (Hyp-C6-NHAc), N-(caproyl-4-hydroxyprolinol (Hyp-C6), N-(acetyl-4-hydroxyprolinol (Hyp-NHAc), thymidine-2′-O-deoxythymidine (ether), N-(aminocaproyl)-4-hydroxyprolinol (Hyp-C6-amino), 2-docosanoyl-uridine-3″-phosphate, inverted base dT(idT) and others. Disclosure of this modification can be found in WO 2011/005861.

[0306] Other modifications of a RNAi agent of the disclosure include a 5′ phosphate or 5′ phosphate mimic, e.g., a 5′-terminal phosphate or phosphate mimic on the antisense strand of a RNAi agent. Suitable phosphate mimics are disclosed in, for example US 2012/0157511, the entire contents of which are incorporated herein by reference.

### A. Modified RNAi Agents Comprising Motifs of the Disclosure

[0307] In certain aspects of the disclosure, the double-stranded RNAi agents of the disclosure include agents with chemical modifications as disclosed, for example, in WO 2013/075035, the entire contents of which are incorporated herein by reference. As shown herein and in WO 2013/075035, a superior result may be obtained by introducing one or more motifs of three identical modifications on three consecutive nucleotides into a sense strand or antisense strand of an RNAi agent, particularly at or near the cleavage site. In some embodiments, the sense strand and antisense strand of the RNAi agent may otherwise be completely modified. The introduction of these motifs interrupts the modification pattern, if present, of the sense or antisense strand. The RNAi agent may be optionally conjugated with a lipophilic ligand, e.g., a C16 ligand, for instance on the sense strand. The RNAi agent may be optionally modified with a (S)-glycol nucleic acid (GNA) modification, for instance on one or more residues of the antisense strand. The resulting RNAi agents present superior gene silencing activity.

[0308] Accordingly, the disclosure provides double stranded RNAi agents capable of inhibiting the expression of a target gene (i.e., an RPS25 gene) in vivo. The RNAi agent comprises a sense strand and an antisense strand. Each strand of the RNAi agent may be 15-30 nucleotides in length. For example, each strand may be 16-30 nucleotides in length, 17-30 nucleotides in length, 25-30 nucleotides in length, 27-30 nucleotides in length, 17-23 nucleotides in length, 17-21 nucleotides in length, 17-19 nucleotides in length, 19-25 nucleotides in length, 19-23 nucleotides in length, 19-21 nucleotides in length, 21-25 nucleotides in length, or 21-23 nucleotides in length. In certain embodiments, each strand is 19-23 nucleotides in length.

[0309] The sense strand and antisense strand typically form a duplex double stranded RNA (“dsRNA”), also referred to herein as an “RNAi agent.” The duplex region of an RNAi agent may be 15-30 nucleotide pairs in length. For example, the duplex region can be 16-30 nucleotide pairs in length, 17-30 nucleotide pairs in length, 27-30 nucleotide pairs in length, 17-23 nucleotide pairs in length, 17-21 nucleotide pairs in length, 17-19 nucleotide pairs in length, 19-25 nucleotide pairs in length, 19-23 nucleotide pairs in length, 19-21 nucleotide pairs in length, 21-25 nucleotide pairs in length, or 21-23 nucleotide pairs in length. In another example, the duplex region is selected from 15, 16, 17, 18, 19, 20, 21, 22, 23, 24, 25, 26, and 27 nucleotides in length. In preferred embodiments, the duplex region is 19-21 nucleotide pairs in length.

[0310] In one embodiment, the RNAi agent may contain one or more overhang regions or capping groups at the 3′-end, 5′-end, or both ends of one or both strands. The overhang can be 1-6 nucleotides in length, for instance 2-6 nucleotides in length, 1-5 nucleotides in length, 2-5 nucleotides in length, 1-4 nucleotides in length, 2-4 nucleotides in length, 1-3 nucleotides in length, 2-3 nucleotides in length, or 1-2 nucleotides in length. In preferred embodiments, the nucleotide overhang region is 2 nucleotides in length. The overhangs can be the result of one strand being longer than the other, or the result of two strands of the same length being staggered. The overhang can form a mismatch with the target mRNA or it can be complementary to the gene sequences being targeted or can be another sequence. The first and second strands can also be joined, e.g., by additional bases to form a hairpin, or by other non-base linkers.

[0311] In one embodiment, the nucleotides in the overhang region of the RNAi agent can each independently be a modified or unmodified nucleotide including, but no limited to 2′-sugar modified, such as, 2-F, 2′-O-methyl, thymidine (T), and any combinations thereof.

[0312] For example, TT can be an overhang sequence for either end on either strand. The overhang can form a mismatch with the target mRNA or it can be complementary to the gene sequences being targeted or can be another sequence.

[0313] The 5′- or 3′-overhangs at the sense strand, antisense strand or both strands of the RNAi agent may be phosphorylated. In some embodiments, the overhang region(s) contains two nucleotides having a phosphorothioate between the two nucleotides, where the two nucleotides can be the same or different. In one embodiment, the overhang is present at the 3′-end of the sense strand, antisense strand, or both strands. In one embodiment, this 3′-overhang is present in the antisense strand. In one embodiment, this 3′-overhang is present in the sense strand.

[0314] The RNAi agent may contain only a single overhang, which can strengthen the interference activity of the RNAi, without affecting its overall stability. For example, the single-stranded overhang may be located at the 3′-terminal end of the sense strand or, alternatively, at the 3′-terminal end of the antisense strand. The RNAi may also have a blunt end, located at the 5′-end of the antisense strand (or the 3′-end of the sense strand) or vice versa. Generally, the antisense strand of the RNAi has a nucleotide overhang at the 3′-end, and the 5′-end is blunt. While not wishing to be bound by theory, the asymmetric blunt end at the 5′-end of the antisense strand and 3′-end overhang of the antisense strand favor the guide strand loading into RISC process.

[0315] In one embodiment, the RNAi agent is a double ended bluntmer of 19 nucleotides in length, wherein the sense strand contains at least one motif of three 2′-F modifications on three consecutive nucleotides at positions 7, 8, 9 from the 5′ end. The antisense strand contains at least one motif of three 2′-O-methyl modifications on three consecutive nucleotides at positions 11, 12, 13 from the 5′ end.

[0316] In another embodiment, the RNAi agent is a double ended bluntmer of 20 nucleotides in length, wherein the sense strand contains at least one motif of three 2′-F modifications on three consecutive nucleotides at positions 8, 9, 10 from the 5′ end. The antisense strand contains at least one motif of three 2′-O-methyl modifications on three consecutive nucleotides at positions 11, 12, 13 from the 5′ end.

[0317] In yet another embodiment, the RNAi agent is a double ended bluntmer of 21 nucleotides in length, wherein the sense strand contains at least one motif of three 2′-F modifications on three consecutive nucleotides at positions 9, 10, 11 from the 5′ end. The antisense strand contains at least one motif of three 2′-O-methyl modifications on three consecutive nucleotides at positions 11, 12, 13 from the 5′ end.

[0318] In one embodiment, the RNAi agent comprises a 21 nucleotide sense strand and a 23 nucleotide antisense strand, wherein the sense strand contains at least one motif of three 2′-F modifications on three consecutive nucleotides at positions 9, 10, 11 from the 5′ end; the antisense strand contains at least one motif of three 2′-O-methyl modifications on three consecutive nucleotides at positions 11, 12, 13 from the 5′ end, wherein one end of the RNAi agent is blunt, while the other end comprises a 2 nucleotide overhang. Preferably, the 2 nucleotide overhang is at the 3′-end of the antisense strand. When the 2 nucleotide overhang is at the 3′-end of the antisense strand, there may be two phosphorothioate internucleotide linkages between the terminal three nucleotides, wherein two of the three nucleotides are the overhang nucleotides, and the third nucleotide is a paired nucleotide next to the overhang nucleotide. In one embodiment, the RNAi agent additionally has two phosphorothioate internucleotide linkages between the terminal three nucleotides at both the 5′-end of the sense strand and at the 5′-end of the antisense strand. In one embodiment, every nucleotide in the sense strand and the antisense strand of the RNAi agent, including the nucleotides that are part of the motifs are modified nucleotides. In one embodiment each residue is independently modified with a 2′-O-methyl or 3′-fluoro, e.g., in an alternating motif. Optionally, the RNAi agent further comprises a ligand (e.g., a lipophilic ligand, optionally a C16 ligand).

[0319] In one embodiment, the RNAi agent comprises a sense and an antisense strand, wherein the sense strand is 25-30 nucleotide residues in length, wherein starting from the 5′ terminal nucleotide (position 1) positions 1 to 23 of the first strand comprise at least 8 ribonucleotides; the antisense strand is 36-66 nucleotide residues in length and, starting from the 3′ terminal nucleotide, comprises at least 8 ribonucleotides in the positions paired with positions 1-23 of sense strand to form a duplex; wherein at least the 3 ‘ terminal nucleotide of antisense strand is unpaired with sense strand, and up to 6 consecutive 3’ terminal nucleotides are unpaired with sense strand, thereby forming a 3′ single stranded overhang of 1-6 nucleotides; wherein the 5′ terminus of antisense strand comprises from 10-30 consecutive nucleotides which are unpaired with sense strand, thereby forming a 10-30 nucleotide single stranded 5′ overhang; wherein at least the sense strand 5′ terminal and 3′ terminal nucleotides are base paired with nucleotides of antisense strand when sense and antisense strands are aligned for maximum complementarity, thereby forming a substantially duplexed region between sense and antisense strands; and antisense strand is sufficiently complementary to a target RNA along at least 19 ribonucleotides of antisense strand length to reduce target gene expression when the double stranded nucleic acid is introduced into a mammalian cell; and wherein the sense strand contains at least one motif of three 2′-F modifications on three consecutive nucleotides, where at least one of the motifs occurs at or near the cleavage site. The antisense strand contains at least one motif of three 2′-O-methyl modifications on three consecutive nucleotides at or near the cleavage site.

[0320] In one embodiment, the RNAi agent comprises sense and antisense strands, wherein the RNAi agent comprises a first strand having a length which is at least 25 and at most 29 nucleotides and a second strand having a length which is at most 30 nucleotides with at least one motif of three 2′-O-methyl modifications on three consecutive nucleotides at position 11, 12, 13 from the 5′ end; wherein the 3′ end of the first strand and the 5′ end of the second strand form a blunt end and the second strand is 1˜4 nucleotides longer at its 3′ end than the first strand, wherein the duplex region region which is at least 25 nucleotides in length, and the second strand is sufficiently complementary to a target mRNA along at least 19 nucleotide of the second strand length to reduce target gene expression when the RNAi agent is introduced into a mammalian cell, and wherein dicer cleavage of the RNAi agent preferentially results in an siRNA comprising the 3′ end of the second strand, thereby reducing expression of the target gene in the mammal. Optionally, the RNAi agent further comprises a ligand.

[0321] In one embodiment, the sense strand of the RNAi agent contains at least one motif of three identical modifications on three consecutive nucleotides, where one of the motifs occurs at the cleavage site in the sense strand.

[0322] In one embodiment, the antisense strand of the RNAi agent can also contain at least one motif of three identical modifications on three consecutive nucleotides, where one of the motifs occurs at or near the cleavage site in the antisense strand.

[0323] For an RNAi agent having a duplex region of 17-23 nucleotide in length, the cleavage site of the antisense strand is typically around the 10, 11 and 12 positions from the 5′-end. Thus the motifs of three identical modifications may occur at the 9, 10, 11 positions; 10, 11, 12 positions; 11, 12, 13 positions; 12, 13, 14 positions; or 13, 14, 15 positions of the antisense strand, the count starting from the 1^{st} nucleotide from the 5′-end of the antisense strand, or, the count starting from the 1^{st} paired nucleotide within the duplex region from the 5′-end of the antisense strand. The cleavage site in the antisense strand may also change according to the length of the duplex region of the RNAi from the 5′-end.

[0324] The sense strand of the RNAi agent may contain at least one motif of three identical modifications on three consecutive nucleotides at the cleavage site of the strand; and the antisense strand may have at least one motif of three identical modifications on three consecutive nucleotides at or near the cleavage site of the strand. When the sense strand and the antisense strand form a dsRNA duplex, the sense strand and the antisense strand can be so aligned that one motif of the three nucleotides on the sense strand and one motif of the three nucleotides on the antisense strand have at least one nucleotide overlap, i.e., at least one of the three nucleotides of the motif in the sense strand forms a base pair with at least one of the three nucleotides of the motif in the antisense strand. Alternatively, at least two nucleotides may overlap, or all three nucleotides may overlap.

[0325] In one embodiment, the sense strand of the RNAi agent may contain more than one motif of three identical modifications on three consecutive nucleotides. The first motif may occur at or near the cleavage site of the strand and the other motifs may be a wing modification. The term “wing modification” herein refers to a motif occurring at another portion of the strand that is separated from the motif at or near the cleavage site of the same strand. The wing modification is either adjacent to the first motif or is separated by at least one or more nucleotides. When the motifs are immediately adjacent to each other then the chemistry of the motifs are distinct from each other and when the motifs are separated by one or more nucleotide than the chemistries can be the same or different. Two or more wing modifications may be present. For instance, when two wing modifications are present, each wing modification may occur at one end relative to the first motif which is at or near cleavage site or on either side of the lead motif.

[0326] Like the sense strand, the antisense strand of the RNAi agent may contain more than one motif of three identical modifications on three consecutive nucleotides, with at least one of the motifs occurring at or near the cleavage site of the strand. This antisense strand may also contain one or more wing modifications in an alignment similar to the wing modifications that may be present on the sense strand.

[0327] In one embodiment, the wing modification on the sense strand or antisense strand of the RNAi agent typically does not include the first one or two terminal nucleotides at the 3′-end, 5′-end or both ends of the strand.

[0328] In another embodiment, the wing modification on the sense strand or antisense strand of the RNAi agent typically does not include the first one or two paired nucleotides within the duplex region at the 3′-end, 5′-end or both ends of the strand.

[0329] When the sense strand and the antisense strand of the RNAi agent each contain at least one wing modification, the wing modifications may fall on the same end of the duplex region, and have an overlap of one, two or three nucleotides.

[0330] When the sense strand and the antisense strand of the RNAi agent each contain at least two wing modifications, the sense strand and the antisense strand can be so aligned that two modifications each from one strand fall on one end of the duplex region, having an overlap of one, two or three nucleotides; two modifications each from one strand fall on the other end of the duplex region, having an overlap of one, two or three nucleotides; two modifications one strand fall on each side of the lead motif, having an overlap of one, two, or three nucleotides in the duplex region.

[0331] In one embodiment, the RNAi agent comprises mismatch(es) with the target, within the duplex, or combinations thereof. The mismatch may occur in the overhang region or the duplex region. The base pair may be ranked on the basis of their propensity to promote dissociation or melting (e.g., on the free energy of association or dissociation of a particular pairing, the simplest approach is to examine the pairs on an individual pair basis, though next neighbor or similar analysis can also be used). In terms of promoting dissociation: A:U is preferred over G:C; G:U is preferred over G:C; and I:C is preferred over G:C (I=inosine). Mismatches, e.g., non-canonical or other than canonical pairings (as described elsewhere herein) are preferred over canonical (A:T, A:U, G:C) pairings; and pairings which include a universal base are preferred over canonical pairings.

[0332] In one embodiment, the RNAi agent comprises at least one of the first 1, 2, 3, 4, or 5 base pairs within the duplex regions from the 5′-end of the antisense strand independently selected from the group of: A:U, G:U, I:C, and mismatched pairs, e.g., non-canonical or other than canonical pairings or pairings which include a universal base, to promote the dissociation of the antisense strand at the 5′-end of the duplex.

[0333] In one embodiment, the nucleotide at the 1 position within the duplex region from the 5′-end in the antisense strand is selected from the group consisting of A, dA, dU, U, and dT. Alternatively, at least one of the first 1, 2 or 3 base pair within the duplex region from the 5′-end of the antisense strand is an AU base pair. For example, the first base pair within the duplex region from the 5′-end of the antisense strand is an AU base pair.

[0334] In another embodiment, the nucleotide at the 3′-end of the sense strand is deoxy-thymine (dT). In another embodiment, the nucleotide at the 3′-end of the antisense strand is deoxy-thymine (dT). In one embodiment, there is a short sequence of deoxy-thymine nucleotides, for example, two dT nucleotides on the 3′-end of the sense or antisense strand.

[0335] In one embodiment, the sense strand sequence may be represented by formula (I):

5′nₚ-Nₐ-(X X X)ᵢ-N_{b}-Y Y Y-N_{b}-(Z Z Z)ⱼ-Nₐ-n_{q}3′ (I)

[0336] wherein:

[0337] i and j are each independently 0 or 1;

[0338] p and q are each independently 0-6;

[0339] each Nₐ independently represents an oligonucleotide sequence comprising 0-25 modified nucleotides, each sequence comprising at least two differently modified nucleotides;

[0340] each N_{b} independently represents an oligonucleotide sequence comprising 0-10 modified nucleotides;

[0341] each nₚ and n_{q} independently represent an overhang nucleotide;

[0342] wherein N_{b} and Y do not have the same modification; and

[0343] XXX, YYY and ZZZ each independently represent one motif of three identical modifications on three consecutive nucleotides. Preferably YYY is all 2′-F modified nucleotides.

[0344] In one embodiment, the Nₐ or N_{b} comprise modifications of alternating pattern.

[0345] In one embodiment, the YYY motif occurs at or near the cleavage site of the sense strand. For example, when the RNAi agent has a duplex region of 17-23 nucleotides in length, the YYY motif can occur at or the vicinity of the cleavage site (e.g.: can occur at positions 6, 7, 8, 7, 8, 9, 8, 9, 10, 9, 10, 11, 10, 11, 12 or 11, 12, 13) of—the sense strand, the count starting from the 1^{st} nucleotide, from the 5′-end; or optionally, the count starting at the 1^{st} paired nucleotide within the duplex region, from the 5′-end.

[0346] In one embodiment, i is 1 and j is 0, or i is 0 and j is 1, or both i and j are 1. The sense strand can therefore be represented by the following formulas:

5′nₚ-Nₐ-YYY-N_{b}-ZZZ-Nₐ-n_{q}3′ (Ib);

5′nₚ-Nₐ-XXX-N_{b}-YYY-Nₐ-n_{q}3′ (Ic); or

5′nₚ-Nₐ-XXX-N_{b}-YYY-N_{b}-ZZZ-Nₐ-n_{q}3′ (Id).

[0347] When the sense strand is represented by formula (Ib), N_{b} represents an oligonucleotide sequence comprising 0-10, 0-7, 0-5, 0-4, 0-2 or 0 modified nucleotides.

[0348] Each Nₐ independently can represent an oligonucleotide sequence comprising 2-20, 2-15, or 2-10 modified nucleotides.

[0349] When the sense strand is represented as formula (Ic), N_{b} represents an oligonucleotide sequence comprising 0-10, 0-7, 0-10, 0-7, 0-5, 0-4, 0-2 or 0 modified nucleotides. Each Nₐ can independently represent an oligonucleotide sequence comprising 2-20, 2-15, or 2-10 modified nucleotides.

[0350] When the sense strand is represented as formula (Id), each N_{b} independently represents an oligonucleotide sequence comprising 0-10, 0-7, 0-5, 0-4, 0-2 or 0 modified nucleotides. Preferably, N_{b} is 0, 1, 2, 3, 4, 5 or 6. Each Nₐ can independently represent an oligonucleotide sequence comprising 2-20, 2-15, or 2-10 modified nucleotides.

[0351] Each of X, Y and Z may be the same or different from each other.

[0352] In other embodiments, i is 0 and j is 0, and the sense strand may be represented by the formula:

5′nₚ-Nₐ-YYY-Nₐ-n_{q}3′ (Ia).

[0353] When the sense strand is represented by formula (Ia), each Nₐ independently can represent an oligonucleotide sequence comprising 2-20, 2-15, or 2-10 modified nucleotides.

[0354] In one embodiment, the antisense strand sequence of the RNAi may be represented by formula (II):

5′n_{q′}-N_{a′}-(Z′Z′Z′)ₖ-N_{b′}-Y′Y′Y′-N_{b′}-(X′X′X′)ₗ-N′ₐ-n_{p′}3′ (II)

[0355] wherein:

[0356] k and 1 are each independently 0 or 1;

[0357] p′ and q′ are each independently 0-6;

each Nₐ′ independently represents an oligonucleotide sequence comprising 0-25 modified nucleotides,
each sequence comprising at least two differently modified nucleotides;
each N_{b}′ independently represents an oligonucleotide sequence comprising 0-10 modified nucleotides;
each nₚ′ and n_{q}′ independently represent an overhang nucleotide;
wherein N_{b}′ and Y′ do not have the same modification;
and
X′X′X′, Y′Y′Y′ and Z′Z′Z′ each independently represent one motif of three identical modifications on three consecutive nucleotides.
In one embodiment, the Nₐ′ or N_{b}′ comprise modifications of alternating pattern.

[0358] The Y′Y′Y′ motif occurs at or near the cleavage site of the antisense strand. For example, when the RNAi agent has a duplex region of 17-23 nucleotide in length, the Y′Y′Y′ motif can occur at positions 9, 10, 11; 10, 11, 12; 11, 12, 13; 12, 13, 14; or 13, 14, 15 of the antisense strand, with the count starting from the 1^{st} nucleotide, from the 5′-end; or optionally, the count starting at the 1^{st} paired nucleotide within the duplex region, from the 5′-end. Preferably, the Y′Y′Y′ motif occurs at positions 11, 12, 13.

[0359] In one embodiment, Y′Y′Y′ motif is all 2′-OMe modified nucleotides.

[0360] In one embodiment, k is 1 and l is 0, or k is 0 and l is 1, or both k and 1 are 1.

[0361] The antisense strand can therefore be represented by the following formulas:

5′n_{q′}-N_{a′}-Z′Z′Z′-N_{b′}-Y′Y′Y′-N_{a′}-n_{p′}3′ (IIb);

5′n_{q′}-N_{a′}-Y′Y′Y′-N_{b′}-X′X′X′-n_{p′}3′ (IIc); or

5′n_{q′}-N_{a′}-Z′Z′Z′-N_{b′}-Y′Y′Y′-N_{b′}-X′X′X′-N_{a′}-n_{p′}3′ (IId).

[0362] When the antisense strand is represented by formula (IIb), N_{b}′ represents an oligonucleotide sequence comprising 0-10, 0-7, 0-10, 0-7, 0-5, 0-4, 0-2 or 0 modified nucleotides. Each Nₐ′ independently represents an oligonucleotide sequence comprising 2-20, 2-15, or 2-10 modified nucleotides.

[0363] When the antisense strand is represented as formula (IIC), N_{b}′ represents an oligonucleotide sequence comprising 0-10, 0-7, 0-10, 0-7, 0-5, 0-4, 0-2 or 0 modified nucleotides. Each Nₐ′ independently represents an oligonucleotide sequence comprising 2-20, 2-15, or 2-10 modified nucleotides.

[0364] When the antisense strand is represented as formula (IId), each N_{b}′ independently represents an oligonucleotide sequence comprising 0-10, 0-7, 0-10, 0-7, 0-5, 0-4, 0-2 or 0 modified nucleotides. Each Nₐ′ independently represents an oligonucleotide sequence comprising 2-20, 2-15, or 2-10 modified nucleotides. Preferably, N_{b} is 0, 1, 2, 3, 4, 5 or 6.

[0365] In other embodiments, k is 0 and l is 0 and the antisense strand may be represented by the formula:

5′n_{p′}-N_{a′}-Y′Y′Y′-Nₐ-n_{q′}3′ (Ia).

[0366] When the antisense strand is represented as formula (IIa), each Nₐ′ independently represents an oligonucleotide sequence comprising 2-20, 2-15, or 2-10 modified nucleotides.

[0367] Each of X′, Y′ and Z′ may be the same or different from each other.

[0368] Each nucleotide of the sense strand and antisense strand may be independently modified with LNA, HNA, CeNA, 2′-methoxyethyl, 2′-O-methyl, 2′-O-allyl, 2′-C-allyl, 2′-hydroxyl, or 2′-fluoro. For example, each nucleotide of the sense strand and antisense strand is independently modified with 2′-O-methyl or 2′-fluoro. Each X, Y, Z, X′, Y′ and Z′, in particular, may represent a 2′-O-methyl modification or a 2′-fluoro modification.

[0369] In one embodiment, the sense strand of the RNAi agent may contain YYY motif occurring at 9, 10 and 11 positions of the strand when the duplex region is 21 nt, the count starting from the 1^{st} nucleotide from the 5′-end, or optionally, the count starting at the 1^{st} paired nucleotide within the duplex region, from the 5′-end; and Y represents 2′-F modification. The sense strand may additionally contain XXX motif or ZZZ motifs as wing modifications at the opposite end of the duplex region; and XXX and ZZZ each independently represents a 2′-OMe modification or 2′-F modification.

[0370] In one embodiment the antisense strand may contain Y′Y′Y′ motif occurring at positions 11, 12, 13 of the strand, the count starting from the 1^{st} nucleotide from the 5′-end, or optionally, the count starting at the 1^{st} paired nucleotide within the duplex region, from the 5′-end; and Y′ represents 2′-O-methyl modification. The antisense strand may additionally contain X′X′X′ motif or Z′Z′Z′ motifs as wing modifications at the opposite end of the duplex region; and X′X′X′ and Z′Z′Z′ each independently represents a 2′-OMe modification or 2′-F modification.

[0371] The sense strand represented by any one of the above formulas (Ia), (Ib), (Ic), and (Id) forms a duplex with a antisense strand being represented by any one of formulas (IIa), (IIb), (IIc), and (IId), respectively.

[0372] Accordingly, the RNAi agents for use in the methods of the disclosure may comprise a sense strand and an antisense strand, each strand having 14 to 30 nucleotides, the RNAi duplex represented by formula (III):

sense: 5′nₚ-Nₐ-(X X X)ᵢ-N_{b}-Y Y Y-N_{b}-(Z Z Z)ⱼ-Nₐ-n_{q}3′

antisense: 3′n_{p′}-N_{a′}-(X′X′X′)ₖ-N_{b′}-Y′Y′Y′-N_{b′}-(Z′Z′Z′)ₗ-N_{a′}-n_{q′}5′ (III)

[0373] wherein:

[0374] j, k, and 1 are each independently 0 or 1;

[0375] p, p′, q, and q′ are each independently 0-6;

[0376] each Nₐ and Nₐ′ independently represents an oligonucleotide sequence comprising 0-25 modified nucleotides, each sequence comprising at least two differently modified nucleotides;

[0377] each N_{b} and N_{b}′ independently represents an oligonucleotide sequence comprising 0-10 modified nucleotides;

[0378] wherein

[0379] each nₚ′, nₚ, n_{q}′, and n_{q}, each of which may or may not be present, independently represents an overhang nucleotide; and

[0380] XXX, YYY, ZZZ, X′X′X′, Y′Y′Y′, and Z′Z′Z′ each independently represent one motif of three identical modifications on three consecutive nucleotides.

[0381] In one embodiment, i is 0 and j is 0; or i is 1 and j is 0; or i is 0 and j is 1; or both i and j are 0; or both i and j are 1. In another embodiment, k is 0 and l is 0; or k is 1 and l is 0; k is 0 and l is 1; or both k and l are 0; or both k and l are 1.

[0382] Exemplary combinations of the sense strand and antisense strand forming a RNAi duplex include the formulas below:

5′nₚ-Nₐ-Y Y Y-Nₐ-n_{q}3′3′n_{p′}-N_{a′}-Y′Y′Y′-N_{a′}n_{q′}5′ (IIa)

5′nₚ-Nₐ-Y Y Y-N_{b}-Z Z Z-Nₐ-n_{q}3′3′n_{p′}-N_{a′}-Y′Y′Y′-N_{b′}-Z′Z′Z′-N_{a′}n_{q′}5′ (IIIb)

5′nₚ-Nₐ-X X X-N_{b}-Y Y Y-Nₐn_{q}3′3′n_{p′}-N_{a′}-X′X′X′-N_{b′}-Y′Y′Y′-N_{a′}-n_{q′}5′ (IIIc)

5′nₚ-Nₐ-X X X-N_{b}-Y Y Y-N_{b}-Z Z Z-Nₐ-n_{q}3′3′n_{p′}-N_{a′}-X′X′X′-N_{b′}-Y′Y′Y′-N_{b′}-Z′Z′Z′-Nₐ-n_{q′}5′ (IIId)

[0383] When the RNAi agent is represented by formula (IIa), each Nₐ independently represents an oligonucleotide sequence comprising 2-20, 2-15, or 2-10 modified nucleotides.

[0384] When the RNAi agent is represented by formula (IIIb), each N_{b} independently represents an oligonucleotide sequence comprising 1-10, 1-7, 1-5 or 1-4 modified nucleotides. Each Nₐ independently represents an oligonucleotide sequence comprising 2-20, 2-15, or 2-10 modified nucleotides.

[0385] When the RNAi agent is represented as formula (IIIc), each N_{b}, N_{b}′ independently represents an oligonucleotide sequence comprising 0-10, 0-7, 0-10, 0-7, 0-5, 0-4, 0-2 or 0 modified nucleotides. Each Nₐ independently represents an oligonucleotide sequence comprising 2-20, 2-15, or 2-10 modified nucleotides.

[0386] When the RNAi agent is represented as formula (IIId), each N_{b}, N_{b}′ independently represents an oligonucleotide sequence comprising 0-10, 0-7, 0-10, 0-7, 0-5, 0-4, 0-2 or 0 modified nucleotides. Each Nₐ, Nₐ′ independently represents an oligonucleotide sequence comprising 2-20, 2-15, or 2-10 modified nucleotides. Each of Nₐ, Nₐ′, N_{b} and N_{b}′ independently comprises modifications of alternating pattern.

[0387] In one embodiment, when the RNAi agent is represented by formula (IIId), the Nₐ modifications are 2′-O-methyl or 2′-fluoro modifications. In another embodiment, when the RNAi agent is represented by formula (IIId), the Nₐ modifications are 2′-O-methyl or 2′-fluoro modifications and n_{p′}>0 and at least one nₚ′ is linked to a neighboring nucleotide a via phosphorothioate linkage. In yet another embodiment, when the RNAi agent is represented by formula (IIId), the Nₐ modifications are 2′-O-methyl or 2′-fluoro modifications, n_{p′}>0 and at least one nₚ′ is linked to a neighboring nucleotide via phosphorothioate linkage, and the sense strand is conjugated to one or more C16 (or related) moieties attached through a bivalent or trivalent branched linker (described below). In another embodiment, when the RNAi agent is represented by formula (IIId), the Nₐ modifications are 2′-O-methyl or 2′-fluoro modifications, n_{p′}>0 and at least one nₚ′ is linked to a neighboring nucleotide via phosphorothioate linkage, the sense strand comprises at least one phosphorothioate linkage, and the sense strand is conjugated to one or more lipophilic, e.g., C16 (or related) moieties, optionally attached through a bivalent or trivalent branched linker.

[0388] In one embodiment, when the RNAi agent is represented by formula (IIa), the Nₐ modifications are 2′-O-methyl or 2′-fluoro modifications, n_{p′}>0 and at least one nₚ′ is linked to a neighboring nucleotide via phosphorothioate linkage, the sense strand comprises at least one phosphorothioate linkage, and the sense strand is conjugated to one or more lipophilic, e.g., C16 (or related) moieties attached through a bivalent or trivalent branched linker.

[0389] In one embodiment, the RNAi agent is a multimer containing at least two duplexes represented by formula (III), (IIa), (IIIb), (IIIc), and (IIId), wherein the duplexes are connected by a linker. The linker can be cleavable or non-cleavable. Optionally, the multimer further comprises a ligand. Each of the duplexes can target the same gene or two different genes; or each of the duplexes can target same gene at two different target sites.

[0390] In one embodiment, the RNAi agent is a multimer containing three, four, five, six or more duplexes represented by formula (III), (IIa), (IIIb), (IIIc), and (IIId), wherein the duplexes are connected by a linker. The linker can be cleavable or non-cleavable. Optionally, the multimer further comprises a ligand. Each of the duplexes can target the same gene or two different genes; or each of the duplexes can target same gene at two different target sites.

[0391] In one embodiment, two RNAi agents represented by formula (III), (IIa), (IIIb), (IIIc), and (IIId) are linked to each other at the 5′ end, and one or both of the 3′ ends and are optionally conjugated to a ligand. Each of the agents can target the same gene or two different genes; or each of the agents can target same gene at two different target sites.

[0392] Various publications describe multimeric RNAi agents that can be used in the methods of the disclosure. Such publications include WO2007/091269, WO2010/141511, WO2007/117686, WO2009/014887, and WO2011/031520; and U.S. Pat. No. 7,858,769, the entire contents of each of which are hereby incorporated herein by reference.

[0393] In certain embodiments, the compositions and methods of the disclosure include a vinyl phosphonate (VP) modification of an RNAi agent as described herein. In exemplary embodiments, a vinyl phosphonate of the disclosure has the following structure:

[chemical structure]

A vinyl phosphonate of the instant disclosure may be attached to either the antisense or the sense strand of a dsRNA of the disclosure. In certain preferred embodiments, a vinyl phosphonate of the instant disclosure is attached to the antisense strand of a dsRNA, optionally at the 5′ end of the antisense strand of the dsRNA.

[0394] Vinyl phosphate modifications are also contemplated for the compositions and methods of the instant disclosure. An exemplary vinyl phosphate structure is:

[chemical structure]

[0395] E. Thermally Destabilizing Modifications

[0396] In certain embodiments, a dsRNA molecule can be optimized for RNA interference by incorporating thermally destabilizing modifications in the seed region of the antisense strand (i.e., at positions 2-9 of the 5′-end of the antisense strand) to reduce or inhibit off-target gene silencing. It has been discovered that dsRNAs with an antisense strand comprising at least one thermally destabilizing modification of the duplex within the first 9 nucleotide positions, counting from the 5′ end, of the antisense strand have reduced off-target gene silencing activity. Accordingly, in some embodiments, the antisense strand comprises at least one (e.g., one, two, three, four, five or more) thermally destabilizing modification of the duplex within the first 9 nucleotide positions of the 5′ region of the antisense strand. In some embodiments, one or more thermally destabilizing modification(s) of the duplex is/are located in positions 2-9, or preferably positions 4-8, from the 5′-end of the antisense strand. In some further embodiments, the thermally destabilizing modification(s) of the duplex is/are located at position 6, 7 or 8 from the 5′-end of the antisense strand. In still some further embodiments, the thermally destabilizing modification of the duplex is located at position 7 from the 5′-end of the antisense strand. The term “thermally destabilizing modification(s)” includes modification(s) that would result with a dsRNA with a lower overall melting temperature (Tm) (preferably a Tm with one, two, three or four degrees lower than the Tm of the dsRNA without having such modification(s). In some embodiments, the thermally destabilizing modification of the duplex is located at position 2, 3, 4, 5 or 9 from the 5′-end of the antisense strand.

[0397] The thermally destabilizing modifications can include, but are not limited to, abasic modification; mismatch with the opposing nucleotide in the opposing strand; and sugar modification such as 2′-deoxy modification or acyclic nucleotide, e.g., unlocked nucleic acids (UNA) or glycol nucleic acid (GNA).

[0398] Exemplified abasic modifications include, but are not limited to the following:

[chemical structure]

### Wherein R=H, Me, Et or OMe; R′=H, Me, Et or OMe; R″=H, Me, Et or OMe

[chemical structure]

wherein B is a modified or unmodified nucleobase.

[0400] Exemplified sugar modifications include, but are not limited to the following:

[chemical structure]

wherein B is a modified or unmodified nucleobase.

[0401] In some embodiments the thermally destabilizing modification of the duplex is selected from the group consisting of:

[chemical structure]

wherein B is a modified or unmodified nucleobase and the asterisk on each structure represents either R, S or racemic.

[0402] The term “acyclic nucleotide” refers to any nucleotide having an acyclic ribose sugar, for example, where any of bonds between the ribose carbons (e.g., C1′-C2′, C2′-C3′, C3′-C4′, C4′-O4′, or C1′-O4′) is absent or at least one of ribose carbons or oxygen (e.g., C C2′, C3′, C4′ or 04′) are independently or in combination absent from the nucleotide. In some embodiments, acyclic nucleotide is

[chemical structure]

wherein B is a modified or unmodified nucleobase, R¹ and R² independently are H, halogen, OR₃, or alkyl; and R₃ is H, alkyl, cycloalkyl, aryl, aralkyl, heteroaryl or sugar). The term “UNA” refers to unlocked acyclic nucleic acid, wherein any of the bonds of the sugar has been removed, forming an unlocked “sugar” residue. In one example, UNA also encompasses monomers with bonds between C1′-C4′ being removed (i.e. the covalent carbon-oxygen-carbon bond between the C1′ and C4′ carbons). In another example, the C2′-C3′ bond (i.e. the covalent carbon-carbon bond between the C2′ and C3′ carbons) of the sugar is removed (see Mikhailov et. al., Tetrahedron Letters, 26 (17): 2059 (1985); and Fluiter et al., Mol. Biosyst., 10: 1039 (2009), which are hereby incorporated by reference in their entirety). The acyclic derivative provides greater backbone flexibility without affecting the Watson-Crick pairings. The acyclic nucleotide can be linked via 2′-5′ or 3′-5′ linkage.

[0403] The term ‘GNA’ refers to glycol nucleic acid which is a polymer similar to DNA or RNA but differing in the composition of its “backbone” in that is composed of repeating glycerol units linked by phosphodiester bonds:

[chemical structure]

[0404] The thermally destabilizing modification of the duplex can be mismatches (i.e., noncomplementary base pairs) between the thermally destabilizing nucleotide and the opposing nucleotide in the opposite strand within the dsRNA duplex. Exemplary mismatch base pairs include G:G, G:A, G:U, G:T, A:A, A:C, C:C, C:U, C:T, U:U, T:T, U:T, or a combination thereof. Other mismatch base pairings known in the art are also amenable to the present invention. A mismatch can occur between nucleotides that are either naturally occurring nucleotides or modified nucleotides, i.e., the mismatch base pairing can occur between the nucleobases from respective nucleotides independent of the modifications on the ribose sugars of the nucleotides. In certain embodiments, the dsRNA molecule contains at least one nucleobase in the mismatch pairing that is a 2′-deoxy nucleobase; e.g., the 2′-deoxy nucleobase is in the sense strand.

[0405] In some embodiments, the thermally destabilizing modification of the duplex in the seed region of the antisense strand includes nucleotides with impaired W—C H-bonding to complementary base on the target mRNA, such as:

[chemical structure]

[0406] More examples of abasic nucleotide, acyclic nucleotide modifications (including UNA and GNA), and mismatch modifications have been described in detail in WO 2011/133876, which is herein incorporated by reference in its entirety.

The thermally destabilizing modifications may also include universal base with reduced or abolished capability to form hydrogen bonds with the opposing bases, and phosphate modifications.

[0407] In some embodiments, the thermally destabilizing modification of the duplex includes nucleotides with non-canonical bases such as, but not limited to, nucleobase modifications with impaired or completely abolished capability to form hydrogen bonds with bases in the opposite strand. These nucleobase modifications have been evaluated for destabilization of the central region of the dsRNA duplex as described in WO 2010/0011895, which is herein incorporated by reference in its entirety. Exemplary nucleobase modifications are:

[chemical structure]

[0408] In some embodiments, the thermally destabilizing modification of the duplex in the seed region of the antisense strand includes one or more α-nucleotide complementary to the base on the target mRNA, such as:

[chemical structure]

wherein R is H, OH, OCH₃, F, NH₂, NHMe, NMe₂ or O-alkyl.

[0409] Exemplary phosphate modifications known to decrease the thermal stability of dsRNA duplexes compared to natural phosphodiester linkages are:

[chemical structure]

[0410] The alkyl for the R group can be a C₁-C₆alkyl. Specific alkyls for the R group include, but are not limited to methyl, ethyl, propyl, isopropyl, butyl, pentyl and hexyl.

As the skilled artisan will recognize, in view of the functional role of nucleobases is defining specificity of a RNAi agent of the disclosure, while nucleobase modifications can be performed in the various manners as described herein, e.g., to introduce destabilizing modifications into a RNAi agent of the disclosure, e.g., for purpose of enhancing on-target effect relative to off-target effect, the range of modifications available and, in general, present upon RNAi agents of the disclosure tends to be much greater for non-nucleobase modifications, e.g., modifications to sugar groups or phosphate backbones of polyribonucleotides. Such modifications are described in greater detail in other sections of the instant disclosure and are expressly contemplated for RNAi agents of the disclosure, either possessing native nucleobases or modified nucleobases as described above or elsewhere herein.

[0411] In addition to the antisense strand comprising a thermally destabilizing modification, the dsRNA can also comprise one or more stabilizing modifications. For example, the dsRNA can comprise at least two (e.g., two, three, four, five, six, seven, eight, nine, ten or more) stabilizing modifications. Without limitations, the stabilizing modifications all can be present in one strand. In some embodiments, both the sense and the antisense strands comprise at least two stabilizing modifications. The stabilizing modification can occur on any nucleotide of the sense strand or antisense strand. For instance, the stabilizing modification can occur on every nucleotide on the sense strand or antisense strand; each stabilizing modification can occur in an alternating pattern on the sense strand or antisense strand; or the sense strand or antisense strand comprises both stabilizing modification in an alternating pattern. The alternating pattern of the stabilizing modifications on the sense strand may be the same or different from the antisense strand, and the alternating pattern of the stabilizing modifications on the sense strand can have a shift relative to the alternating pattern of the stabilizing modifications on the antisense strand.

[0412] In some embodiments, the antisense strand comprises at least two (e.g., two, three, four, five, six, seven, eight, nine, ten or more) stabilizing modifications. Without limitations, a stabilizing modification in the antisense strand can be present at any positions. In some embodiments, the antisense comprises stabilizing modifications at positions 2, 6, 8, 9, 14, and 16 from the 5′-end. In some other embodiments, the antisense comprises stabilizing modifications at positions 2, 6, 14, and 16 from the 5′-end. In still some other embodiments, the antisense comprises stabilizing modifications at positions 2, 14, and 16 from the 5′-end.

[0413] In some embodiments, the antisense strand comprises at least one stabilizing modification adjacent to the destabilizing modification. For example, the stabilizing modification can be the nucleotide at the 5′-end or the 3′-end of the destabilizing modification, i.e., at position −1 or +1 from the position of the destabilizing modification. In some embodiments, the antisense strand comprises a stabilizing modification at each of the 5′-end and the 3′-end of the destabilizing modification, i.e., positions −1 and +1 from the position of the destabilizing modification.

[0414] In some embodiments, the antisense strand comprises at least two stabilizing modifications at the 3′-end of the destabilizing modification, i.e., at positions +1 and +2 from the position of the destabilizing modification.

[0415] In some embodiments, the sense strand comprises at least two (e.g., two, three, four, five, six, seven, eight, nine, ten or more) stabilizing modifications. Without limitations, a stabilizing modification in the sense strand can be present at any positions. In some embodiments, the sense strand comprises stabilizing modifications at positions 7, 10, and 11 from the 5′-end. In some other embodiments, the sense strand comprises stabilizing modifications at positions 7, 9, 10, and 11 from the 5′-end. In some embodiments, the sense strand comprises stabilizing modifications at positions opposite or complimentary to positions 11, 12, and 15 of the antisense strand, counting from the 5′-end of the antisense strand. In some other embodiments, the sense strand comprises stabilizing modifications at positions opposite or complimentary to positions 11, 12, 13, and 15 of the antisense strand, counting from the 5′-end of the antisense strand. In some embodiments, the sense strand comprises a block of two, three, or four stabilizing modifications.

[0416] In some embodiments, the sense strand does not comprise a stabilizing modification in position opposite or complimentary to the thermally destabilizing modification of the duplex in the antisense strand.

[0417] Exemplary thermally stabilizing modifications include, but are not limited to, 2′-fluoro modifications. Other thermally stabilizing modifications include, but are not limited to, LNA.

[0418] In some embodiments, the dsRNA of the disclosure comprises at least four (e.g., four, five, six, seven, eight, nine, ten, or more) 2′-fluoro nucleotides. Without limitations, the 2′-fluoro nucleotides all can be present in one strand. In some embodiments, both the sense and the antisense strands comprise at least two 2′-fluoro nucleotides. The 2′-fluoro modification can occur on any nucleotide of the sense strand or antisense strand. For instance, the 2′-fluoro modification can occur on every nucleotide on the sense strand or antisense strand; each 2′-fluoro modification can occur in an alternating pattern on the sense strand or antisense strand; or the sense strand or antisense strand comprises both 2′-fluoro modifications in an alternating pattern. The alternating pattern of the 2′-fluoro modifications on the sense strand may be the same or different from the antisense strand, and the alternating pattern of the 2′-fluoro modifications on the sense strand can have a shift relative to the alternating pattern of the 2′-fluoro modifications on the antisense strand.

[0419] In some embodiments, the antisense strand comprises at least two (e.g., two, three, four, five, six, seven, eight, nine, ten, or more) 2′-fluoro nucleotides. Without limitations, a 2′-fluoro modification in the antisense strand can be present at any positions. In some embodiments, the antisense comprises 2′-fluoro nucleotides at positions 2, 6, 8, 9, 14, and 16 from the 5′-end. In some other embodiments, the antisense comprises 2′-fluoro nucleotides at positions 2, 6, 14, and 16 from the 5′-end. In still some other embodiments, the antisense comprises 2′-fluoro nucleotides at positions 2, 14, and 16 from the 5′-end.

[0420] In some embodiments, the antisense strand comprises at least one 2′-fluoro nucleotide adjacent to the destabilizing modification. For example, the 2′-fluoro nucleotide can be the nucleotide at the 5′-end or the 3′-end of the destabilizing modification, i.e., at position −1 or +1 from the position of the destabilizing modification. In some embodiments, the antisense strand comprises a 2′-fluoro nucleotide at each of the 5′-end and the 3′-end of the destabilizing modification, i.e., positions −1 and +1 from the position of the destabilizing modification.

[0421] In some embodiments, the antisense strand comprises at least two 2′-fluoro nucleotides at the 3′-end of the destabilizing modification, i.e., at positions +1 and +2 from the position of the destabilizing modification.

[0422] In some embodiments, the sense strand comprises at least two (e.g., two, three, four, five, six, seven, eight, nine, ten or more) 2′-fluoro nucleotides. Without limitations, a 2′-fluoro modification in the sense strand can be present at any positions. In some embodiments, the antisense comprises 2′-fluoro nucleotides at positions 7, 10, and 11 from the 5′-end. In some other embodiments, the sense strand comprises 2′-fluoro nucleotides at positions 7, 9, 10, and 11 from the 5′-end. In some embodiments, the sense strand comprises 2′-fluoro nucleotides at positions opposite or complimentary to positions 11, 12, and 15 of the antisense strand, counting from the 5′-end of the antisense strand. In some other embodiments, the sense strand comprises 2′-fluoro nucleotides at positions opposite or complimentary to positions 11, 12, 13, and 15 of the antisense strand, counting from the 5′-end of the antisense strand. In some embodiments, the sense strand comprises a block of two, three or four 2′-fluoro nucleotides.

[0423] In some embodiments, the sense strand does not comprise a 2′-fluoro nucleotide in position opposite or complimentary to the thermally destabilizing modification of the duplex in the antisense strand.

[0424] In some embodiments, the dsRNA molecule of the disclosure comprises a 21 nucleotides (nt) sense strand and a 23 nucleotides (nt) antisense, wherein the antisense strand contains at least one thermally destabilizing nucleotide, where the at least one thermally destabilizing nucleotide occurs in the seed region of the antisense strand (i.e., at position 2-9 of the 5′-end of the antisense strand), wherein one end of the dsRNA is blunt, while the other end is comprises a 2 nt overhang, and wherein the dsRNA optionally further has at least one (e.g., one, two, three, four, five, six or all seven) of the following characteristics: (i) the antisense comprises 2, 3, 4, 5 or 6 2′-fluoro modifications; (ii) the antisense comprises 1, 2, 3, 4 or 5 phosphorothioate internucleotide linkages; (iii) the sense strand is conjugated with a ligand; (iv) the sense strand comprises 2, 3, 4 or 5 2′-fluoro modifications; (v) the sense strand comprises 1, 2, 3, 4 or 5 phosphorothioate internucleotide linkages; (vi) the dsRNA comprises at least four 2′-fluoro modifications; and (vii) the dsRNA comprises a blunt end at 5′-end of the antisense strand. Preferably, the 2 nt overhang is at the 3′-end of the antisense.

[0425] In some embodiments, the dsRNA molecule of the disclosure comprising a sense and antisense strands, wherein: the sense strand is 25-30 nucleotide residues in length, wherein starting from the 5′ terminal nucleotide (position 1), positions 1 to 23 of said sense strand comprise at least 8 ribonucleotides; antisense strand is 36-66 nucleotide residues in length and, starting from the 3′ terminal nucleotide, at least 8 ribonucleotides in the positions paired with positions 1-23 of sense strand to form a duplex; wherein at least the 3 ‘ terminal nucleotide of antisense strand is unpaired with sense strand, and up to 6 consecutive 3’ terminal nucleotides are unpaired with sense strand, thereby forming a 3′ single stranded overhang of 1-6 nucleotides; wherein the 5′ terminus of antisense strand comprises from 10-30 consecutive nucleotides which are unpaired with sense strand, thereby forming a 10-30 nucleotide single stranded 5′ overhang; wherein at least the sense strand 5′ terminal and 3′ terminal nucleotides are base paired with nucleotides of antisense strand when sense and antisense strands are aligned for maximum complementarity, thereby forming a substantially duplexed region between sense and antisense strands; and antisense strand is sufficiently complementary to a target RNA along at least 19 ribonucleotides of antisense strand length to reduce target gene expression when said double stranded nucleic acid is introduced into a mammalian cell; and wherein the antisense strand contains at least one thermally destabilizing nucleotide, where at least one thermally destabilizing nucleotide is in the seed region of the antisense strand (i.e. at position 2-9 of the 5′-end of the antisense strand). For example, the thermally destabilizing nucleotide occurs between positions opposite or complimentary to positions 14-17 of the 5′-end of the sense strand, and wherein the dsRNA optionally further has at least one (e.g., one, two, three, four, five, six or all seven) of the following characteristics: (i) the antisense comprises 2, 3, 4, 5, or 6 2′-fluoro modifications; (ii) the antisense comprises 1, 2, 3, 4, or 5 phosphorothioate internucleotide linkages; (iii) the sense strand is conjugated with a ligand; (iv) the sense strand comprises 2, 3, 4, or 5 2′-fluoro modifications; (v) the sense strand comprises 1, 2, 3, 4, or 5 phosphorothioate internucleotide linkages; and (vi) the dsRNA comprises at least four 2′-fluoro modifications; and (vii) the dsRNA comprises a duplex region of 12-30 nucleotide pairs in length.

[0426] In some embodiments, the dsRNA molecule of the disclosure comprises a sense and antisense strands, wherein said dsRNA molecule comprises a sense strand having a length which is at least 25 and at most 29 nucleotides and an antisense strand having a length which is at most 30 nucleotides with the sense strand comprises a modified nucleotide that is susceptible to enzymatic degradation at position 11 from the 5′ end, wherein the 3′ end of said sense strand and the 5′ end of said antisense strand form a blunt end and said antisense strand is 1-4 nucleotides longer at its 3′ end than the sense strand, wherein the duplex region which is at least 25 nucleotides in length, and said antisense strand is sufficiently complementary to a target mRNA along at least 19 nt of said antisense strand length to reduce target gene expression when said dsRNA molecule is introduced into a mammalian cell, and wherein dicer cleavage of said dsRNA preferentially results in an siRNA comprising said 3′ end of said antisense strand, thereby reducing expression of the target gene in the mammal, wherein the antisense strand contains at least one thermally destabilizing nucleotide, where the at least one thermally destabilizing nucleotide is in the seed region of the antisense strand (i.e. at position 2-9 of the 5′-end of the antisense strand), and wherein the dsRNA optionally further has at least one (e.g., one, two, three, four, five, six or all seven) of the following characteristics: (i) the antisense comprises 2, 3, 4, 5, or 6 2′-fluoro modifications; (ii) the antisense comprises 1, 2, 3, 4, or 5 phosphorothioate internucleotide linkages; (iii) the sense strand is conjugated with a ligand; (iv) the sense strand comprises 2, 3, 4, or 5 2′-fluoro modifications; (v) the sense strand comprises 1, 2, 3, 4, or 5 phosphorothioate internucleotide linkages; and (vi) the dsRNA comprises at least four 2′-fluoro modifications; and (vii) the dsRNA has a duplex region of 12-29 nucleotide pairs in length.

[0427] In some embodiments, every nucleotide in the sense strand and antisense strand of the dsRNA molecule may be modified. Each nucleotide may be modified with the same or different modification which can include one or more alteration of one or both of the non-linking phosphate oxygens or of one or more of the linking phosphate oxygens; alteration of a constituent of the ribose sugar, e.g., of the 2′ hydroxyl on the ribose sugar; wholesale replacement of the phosphate moiety with “dephospho” linkers; modification or replacement of a naturally occurring base; and replacement or modification of the ribose-phosphate backbone.

[0428] As nucleic acids are polymers of subunits, many of the modifications occur at a position which is repeated within a nucleic acid, e.g., a modification of a base, or a phosphate moiety, or a non-linking 0 of a phosphate moiety. In some cases, the modification will occur at all of the subject positions in the nucleic acid but in many cases it will not. By way of example, a modification may only occur at a 3′ or 5′ terminal position, may only occur in a terminal region, e.g., at a position on a terminal nucleotide or in the last 2, 3, 4, 5, or 10 nucleotides of a strand. A modification may occur in a double strand region, a single strand region, or in both. A modification may occur only in the double strand region of an RNA or may only occur in a single strand region of an RNA. E.g., a phosphorothioate modification at a non-linking 0 position may only occur at one or both termini, may only occur in a terminal region, e.g., at a position on a terminal nucleotide or in the last 2, 3, 4, 5, or 10 nucleotides of a strand, or may occur in double strand and single strand regions, particularly at termini. The 5′ end or ends can be phosphorylated.

[0429] It may be possible, e.g., to enhance stability, to include particular bases in overhangs, or to include modified nucleotides or nucleotide surrogates, in single strand overhangs, e.g., in a 5′ or 3′ overhang, or in both. E.g., it can be desirable to include purine nucleotides in overhangs. In some embodiments all or some of the bases in a 3′ or 5′ overhang may be modified, e.g., with a modification described herein. Modifications can include, e.g., the use of modifications at the 2′ position of the ribose sugar with modifications that are known in the art, e.g., the use of deoxyribonucleotides, 2′-deoxy-2′-fluoro (2′-F) or 2′-O-methyl modified instead of the ribosugar of the nucleobase, and modifications in the phosphate group, e.g., phosphorothioate modifications. Overhangs need not be homologous with the target sequence.

[0430] In some embodiments, each residue of the sense strand and antisense strand is independently modified with LNA, HNA, CeNA, 2′-methoxyethyl, 2′-O-methyl, 2′-O-allyl, 2′-C-allyl, 2′-deoxy, or 2′-fluoro. The strands can contain more than one modification. In some embodiments, each residue of the sense strand and antisense strand is independently modified with 2′-O-methyl or 2′-fluoro. It is to be understood that these modifications are in addition to the at least one thermally destabilizing modification of the duplex present in the antisense strand.

[0431] At least two different modifications are typically present on the sense strand and antisense strand. Those two modifications may be the 2′-deoxy, 2′-O-methyl or 2′-fluoro modifications, acyclic nucleotides or others. In some embodiments, the sense strand and antisense strand each comprises two differently modified nucleotides selected from 2′-O-methyl or 2′-deoxy. In some embodiments, each residue of the sense strand and antisense strand is independently modified with 2′-O-methyl nucleotide, 2′-deoxy nucleotide, 2′-deoxy-2′-fluoro nucleotide, 2′-O—N-methylacetamido (2′-O-NMA) nucleotide, a 2′-O-dimethylaminoethoxyethyl (2′-O-DMAEOE) nucleotide, 2′-O-aminopropyl (2′-O-AP) nucleotide, or 2′-ara-F nucleotide. Again, it is to be understood that these modifications are in addition to the at least one thermally destabilizing modification of the duplex present in the antisense strand.

[0432] In some embodiments, the dsRNA molecule of the disclosure comprises modifications of an alternating pattern, particular in the B1, B2, B3, B1′, B2′, B3′, B4′ regions. The term “alternating motif” or “alternative pattern” as used herein refers to a motif having one or more modifications, each modification occurring on alternating nucleotides of one strand. The alternating nucleotide may refer to one per every other nucleotide or one per every three nucleotides, or a similar pattern. For example, if A, B and C each represent one type of modification to the nucleotide, the alternating motif can be “ABABABABABAB . . . ,” “AABBAABBAABB . . . ,” “AABAABAABAAB . . . ,” “AAABAAABAAAB . . . ,” “AAABBBAAABBB . . . ,” or “ABCABCABCABC . . . ,” etc. The type of modifications contained in the alternating motif may be the same or different. For example, if A, B, C, D each represent one type of modification on the nucleotide, the alternating pattern, i.e., modifications on every other nucleotide, may be the same, but each of the sense strand or antisense strand can be selected from several possibilities of modifications within the alternating motif such as “ABABAB . . . ”, “ACACAC . . . ” “BDBDBD . . . ” or “CDCDCD . . . ,” etc.

[0433] In some embodiments, the dsRNA molecule of the disclosure comprises the modification pattern for the alternating motif on the sense strand relative to the modification pattern for the alternating motif on the antisense strand is shifted. The shift may be such that the modified group of nucleotides of the sense strand corresponds to a differently modified group of nucleotides of the antisense strand and vice versa. For example, the sense strand when paired with the antisense strand in the dsRNA duplex, the alternating motif in the sense strand may start with “ABABAB” from 5′-3′ of the strand and the alternating motif in the antisense strand may start with “BABABA” from 3′-5′ of the strand within the duplex region. As another example, the alternating motif in the sense strand may start with “AABBAABB” from 5′-3′ of the strand and the alternating motif in the antisense strand may start with “BBAABBAA” from 3′-5′ of the strand within the duplex region, so that there is a complete or partial shift of the modification patterns between the sense strand and the antisense strand.

[0434] The dsRNA molecule of the disclosure may further comprise at least one phosphorothioate or methylphosphonate internucleotide linkage. The phosphorothioate or methylphosphonate internucleotide linkage modification may occur on any nucleotide of the sense strand or antisense strand or both in any position of the strand. For instance, the internucleotide linkage modification may occur on every nucleotide on the sense strand or antisense strand; each internucleotide linkage modification may occur in an alternating pattern on the sense strand or antisense strand; or the sense strand or antisense strand comprises both internucleotide linkage modifications in an alternating pattern. The alternating pattern of the internucleotide linkage modification on the sense strand may be the same or different from the antisense strand, and the alternating pattern of the internucleotide linkage modification on the sense strand may have a shift relative to the alternating pattern of the internucleotide linkage modification on the antisense strand.

[0435] In some embodiments, the dsRNA molecule comprises the phosphorothioate or methylphosphonate internucleotide linkage modification in the overhang region. For example, the overhang region comprises two nucleotides having a phosphorothioate or methylphosphonate internucleotide linkage between the two nucleotides. Internucleotide linkage modifications also may be made to link the overhang nucleotides with the terminal paired nucleotides within duplex region. For example, at least 2, 3, 4, or all the overhang nucleotides may be linked through phosphorothioate or methylphosphonate internucleotide linkage, and optionally, there may be additional phosphorothioate or methylphosphonate internucleotide linkages linking the overhang nucleotide with a paired nucleotide that is next to the overhang nucleotide. For instance, there may be at least two phosphorothioate internucleotide linkages between the terminal three nucleotides, in which two of the three nucleotides are overhang nucleotides, and the third is a paired nucleotide next to the overhang nucleotide. Preferably, these terminal three nucleotides may be at the 3′-end of the antisense strand.

[0436] In some embodiments, the sense strand of the dsRNA molecule comprises 1-10 blocks of two to ten phosphorothioate or methylphosphonate internucleotide linkages separated by 1, 2, 3, 4, 5, 6, 7, 8, 9, 10, 11, 12, 13, 14, 15, or 16 phosphate internucleotide linkages, wherein one of the phosphorothioate or methylphosphonate internucleotide linkages is placed at any position in the oligonucleotide sequence and the said sense strand is paired with an antisense strand comprising any combination of phosphorothioate, methylphosphonate and phosphate internucleotide linkages or an antisense strand comprising either phosphorothioate or methylphosphonate or phosphate linkage.

[0437] In some embodiments, the antisense strand of the dsRNA molecule comprises two blocks of two phosphorothioate or methylphosphonate internucleotide linkages separated by 1, 2, 3, 4, 5, 6, 7, 8, 9, 10, 11, 12, 13, 14, 15, 16, 17, or 18 phosphate internucleotide linkages, wherein one of the phosphorothioate or methylphosphonate internucleotide linkages is placed at any position in the oligonucleotide sequence and the said antisense strand is paired with a sense strand comprising any combination of phosphorothioate, methylphosphonate and phosphate internucleotide linkages or an antisense strand comprising either phosphorothioate or methylphosphonate or phosphate linkage.

[0438] In some embodiments, the antisense strand of the dsRNA molecule comprises two blocks of three phosphorothioate or methylphosphonate internucleotide linkages separated by 1, 2, 3, 4, 5, 6, 7, 8, 9, 10, 11, 12, 13, 14, 15, or 16 phosphate internucleotide linkages, wherein one of the phosphorothioate or methylphosphonate internucleotide linkages is placed at any position in the oligonucleotide sequence and the said antisense strand is paired with a sense strand comprising any combination of phosphorothioate, methylphosphonate and phosphate internucleotide linkages or an antisense strand comprising either phosphorothioate or methylphosphonate or phosphate linkage.

[0439] In some embodiments, the antisense strand of the dsRNA molecule comprises two blocks of four phosphorothioate or methylphosphonate internucleotide linkages separated by 1, 2, 3, 4, 5, 6, 7, 8, 9, 10, 11, 12, 13, or 14 phosphate internucleotide linkages, wherein one of the phosphorothioate or methylphosphonate internucleotide linkages is placed at any position in the oligonucleotide sequence and the said antisense strand is paired with a sense strand comprising any combination of phosphorothioate, methylphosphonate and phosphate internucleotide linkages or an antisense strand comprising either phosphorothioate or methylphosphonate or phosphate linkage.

[0440] In some embodiments, the antisense strand of the dsRNA molecule comprises two blocks of five phosphorothioate or methylphosphonate internucleotide linkages separated by 1, 2, 3, 4, 5, 6, 7, 8, 9, 10, 11, or 12 phosphate internucleotide linkages, wherein one of the phosphorothioate or methylphosphonate internucleotide linkages is placed at any position in the oligonucleotide sequence and the said antisense strand is paired with a sense strand comprising any combination of phosphorothioate, methylphosphonate and phosphate internucleotide linkages or an antisense strand comprising either phosphorothioate or methylphosphonate or phosphate linkage.

[0441] In some embodiments, the antisense strand of the dsRNA molecule comprises two blocks of six phosphorothioate or methylphosphonate internucleotide linkages separated by 1, 2, 3, 4, 5, 6, 7, 8, 9, or 10 phosphate internucleotide linkages, wherein one of the phosphorothioate or methylphosphonate internucleotide linkages is placed at any position in the oligonucleotide sequence and the said antisense strand is paired with a sense strand comprising any combination of phosphorothioate, methylphosphonate and phosphate internucleotide linkages or an antisense strand comprising either phosphorothioate or methylphosphonate or phosphate linkage.

[0442] In some embodiments, the antisense strand of the dsRNA molecule comprises two blocks of seven phosphorothioate or methylphosphonate internucleotide linkages separated by 1, 2, 3, 4, 5, 6, 7, or 8 phosphate internucleotide linkages, wherein one of the phosphorothioate or methylphosphonate internucleotide linkages is placed at any position in the oligonucleotide sequence and the said antisense strand is paired with a sense strand comprising any combination of phosphorothioate, methylphosphonate and phosphate internucleotide linkages or an antisense strand comprising either phosphorothioate or methylphosphonate or phosphate linkage.

[0443] In some embodiments, the antisense strand of the dsRNA molecule comprises two blocks of eight phosphorothioate or methylphosphonate internucleotide linkages separated by 1, 2, 3, 4, 5, or 6 phosphate internucleotide linkages, wherein one of the phosphorothioate or methylphosphonate internucleotide linkages is placed at any position in the oligonucleotide sequence and the said antisense strand is paired with a sense strand comprising any combination of phosphorothioate, methylphosphonate and phosphate internucleotide linkages or an antisense strand comprising either phosphorothioate or methylphosphonate or phosphate linkage.

[0444] In some embodiments, the antisense strand of the dsRNA molecule comprises two blocks of nine phosphorothioate or methylphosphonate internucleotide linkages separated by 1, 2, 3, or 4 phosphate internucleotide linkages, wherein one of the phosphorothioate or methylphosphonate internucleotide linkages is placed at any position in the oligonucleotide sequence and the said antisense strand is paired with a sense strand comprising any combination of phosphorothioate, methylphosphonate and phosphate internucleotide linkages or an antisense strand comprising either phosphorothioate or methylphosphonate or phosphate linkage.

[0445] In some embodiments, the dsRNA molecule of the disclosure further comprises one or more phosphorothioate or methylphosphonate internucleotide linkage modification within 1-10 of the termini position(s) of the sense or antisense strand. For example, at least 2, 3, 4, 5, 6, 7, 8, 9, or 10 nucleotides may be linked through phosphorothioate or methylphosphonate internucleotide linkage at one end or both ends of the sense or antisense strand.

[0446] In some embodiments, the dsRNA molecule of the disclosure further comprises one or more phosphorothioate or methylphosphonate internucleotide linkage modification within 1-10 of the internal region of the duplex of each of the sense or antisense strand. For example, at least 2, 3, 4, 5, 6, 7, 8, 9, or 10 nucleotides may be linked through phosphorothioate methylphosphonate internucleotide linkage at position 8-16 of the duplex region counting from the 5′-end of the sense strand; the dsRNA molecule can optionally further comprise one or more phosphorothioate or methylphosphonate internucleotide linkage modification within 1-10 of the termini position(s).

[0447] In some embodiments, the dsRNA molecule of the disclosure further comprises one to five phosphorothioate or methylphosphonate internucleotide linkage modification(s) within position 1-5 and one to five phosphorothioate or methylphosphonate internucleotide linkage modification(s) within position 18-23 of the sense strand (counting from the 5′-end), and one to five phosphorothioate or methylphosphonate internucleotide linkage modification at positions 1 and 2 and one to five within positions 18-23 of the antisense strand (counting from the 5′-end).

[0448] In some embodiments, the dsRNA molecule of the disclosure further comprises one phosphorothioate internucleotide linkage modification within position 1-5 and one phosphorothioate or methylphosphonate internucleotide linkage modification within position 18-23 of the sense strand (counting from the 5′-end), and one phosphorothioate internucleotide linkage modification at positions 1 and 2 and two phosphorothioate or methylphosphonate internucleotide linkage modifications within positions 18-23 of the antisense strand (counting from the 5′-end).

[0449] In some embodiments, the dsRNA molecule of the disclosure further comprises two phosphorothioate internucleotide linkage modifications within position 1-5 and one phosphorothioate internucleotide linkage modification within position 18-23 of the sense strand (counting from the 5′-end), and one phosphorothioate internucleotide linkage modification at positions 1 and 2 and two phosphorothioate internucleotide linkage modifications within positions 18-23 of the antisense strand (counting from the 5′-end).

[0450] In some embodiments, the dsRNA molecule of the disclosure further comprises two phosphorothioate internucleotide linkage modifications within position 1-5 and two phosphorothioate internucleotide linkage modifications within position 18-23 of the sense strand (counting from the 5′-end), and one phosphorothioate internucleotide linkage modification at positions 1 and 2 and two phosphorothioate internucleotide linkage modifications within positions 18-23 of the antisense strand (counting from the 5′-end).

[0451] In some embodiments, the dsRNA molecule of the disclosure further comprises two phosphorothioate internucleotide linkage modifications within position 1-5 and two phosphorothioate internucleotide linkage modifications within position 18-23 of the sense strand (counting from the 5′-end), and one phosphorothioate internucleotide linkage modification at positions 1 and 2 and one phosphorothioate internucleotide linkage modification within positions 18-23 of the antisense strand (counting from the 5′-end).

[0452] In some embodiments, the dsRNA molecule of the disclosure further comprises one phosphorothioate internucleotide linkage modification within position 1-5 and one phosphorothioate internucleotide linkage modification within position 18-23 of the sense strand (counting from the 5′-end), and two phosphorothioate internucleotide linkage modifications at positions 1 and 2 and two phosphorothioate internucleotide linkage modifications within positions 18-23 of the antisense strand (counting from the 5′-end).

[0453] In some embodiments, the dsRNA molecule of the disclosure further comprises one phosphorothioate internucleotide linkage modification within position 1-5 and one within position 18-23 of the sense strand (counting from the 5′-end), and two phosphorothioate internucleotide linkage modification at positions 1 and 2 and one phosphorothioate internucleotide linkage modification within positions 18-23 of the antisense strand (counting from the 5′-end).

[0454] In some embodiments, the dsRNA molecule of the disclosure further comprises one phosphorothioate internucleotide linkage modification within position 1-5 (counting from the 5′-end) of the sense strand, and two phosphorothioate internucleotide linkage modifications at positions 1 and 2 and one phosphorothioate internucleotide linkage modification within positions 18-23 of the antisense strand (counting from the 5′-end).

[0455] In some embodiments, the dsRNA molecule of the disclosure further comprises two phosphorothioate internucleotide linkage modifications within position 1-5 (counting from the 5′-end) of the sense strand, and one phosphorothioate internucleotide linkage modification at positions 1 and 2 and two phosphorothioate internucleotide linkage modifications within positions 18-23 of the antisense strand (counting from the 5′-end).

[0456] In some embodiments, the dsRNA molecule of the disclosure further comprises two phosphorothioate internucleotide linkage modifications within position 1-5 and one within position 18-23 of the sense strand (counting from the 5′-end), and two phosphorothioate internucleotide linkage modifications at positions 1 and 2 and one phosphorothioate internucleotide linkage modification within positions 18-23 of the antisense strand (counting from the 5′-end).

[0457] In some embodiments, the dsRNA molecule of the disclosure further comprises two phosphorothioate internucleotide linkage modifications within position 1-5 and one phosphorothioate internucleotide linkage modification within position 18-23 of the sense strand (counting from the 5′-end), and two phosphorothioate internucleotide linkage modifications at positions 1 and 2 and two phosphorothioate internucleotide linkage modifications within positions 18-23 of the antisense strand (counting from the 5′-end).

[0458] In some embodiments, the dsRNA molecule of the disclosure further comprises two phosphorothioate internucleotide linkage modifications within position 1-5 and one phosphorothioate internucleotide linkage modification within position 18-23 of the sense strand (counting from the 5′-end), and one phosphorothioate internucleotide linkage modification at positions 1 and 2 and two phosphorothioate internucleotide linkage modifications within positions 18-23 of the antisense strand (counting from the 5′-end).

[0459] In some embodiments, the dsRNA molecule of the disclosure further comprises two phosphorothioate internucleotide linkage modifications at position 1 and 2, and two phosphorothioate internucleotide linkage modifications at position 20 and 21 of the sense strand (counting from the 5′-end), and one phosphorothioate internucleotide linkage modification at positions 1 and one at position 21 of the antisense strand (counting from the 5′-end).

[0460] In some embodiments, the dsRNA molecule of the disclosure further comprises one phosphorothioate internucleotide linkage modification at position 1, and one phosphorothioate internucleotide linkage modification at position 21 of the sense strand (counting from the 5′-end), and two phosphorothioate internucleotide linkage modifications at positions 1 and 2 and two phosphorothioate internucleotide linkage modifications at positions 20 and 21 the antisense strand (counting from the 5′-end).

[0461] In some embodiments, the dsRNA molecule of the disclosure further comprises two phosphorothioate internucleotide linkage modifications at position 1 and 2, and two phosphorothioate internucleotide linkage modifications at position 21 and 22 of the sense strand (counting from the 5′-end), and one phosphorothioate internucleotide linkage modification at positions 1 and one phosphorothioate internucleotide linkage modification at position 21 of the antisense strand (counting from the 5′-end).

[0462] In some embodiments, the dsRNA molecule of the disclosure further comprises one phosphorothioate internucleotide linkage modification at position 1, and one phosphorothioate internucleotide linkage modification at position 21 of the sense strand (counting from the 5′-end), and two phosphorothioate internucleotide linkage modifications at positions 1 and 2 and two phosphorothioate internucleotide linkage modifications at positions 21 and 22 the antisense strand (counting from the 5′-end).

[0463] In some embodiments, the dsRNA molecule of the disclosure further comprises two phosphorothioate internucleotide linkage modifications at position 1 and 2, and two phosphorothioate internucleotide linkage modifications at position 22 and 23 of the sense strand (counting from the 5′-end), and one phosphorothioate internucleotide linkage modification at positions 1 and one phosphorothioate internucleotide linkage modification at position 21 of the antisense strand (counting from the 5′-end).

[0464] In some embodiments, the dsRNA molecule of the disclosure further comprises one phosphorothioate internucleotide linkage modification at position 1, and one phosphorothioate internucleotide linkage modification at position 21 of the sense strand (counting from the 5′-end), and two phosphorothioate internucleotide linkage modifications at positions 1 and 2 and two phosphorothioate internucleotide linkage modifications at positions 23 and 23 the antisense strand (counting from the 5′-end).

[0465] In some embodiments, compound of the disclosure comprises a pattern of backbone chiral centers. In some embodiments, a common pattern of backbone chiral centers comprises at least 5 internucleotidic linkages in the Sp configuration. In some embodiments, a common pattern of backbone chiral centers comprises at least 6 internucleotidic linkages in the Sp configuration. In some embodiments, a common pattern of backbone chiral centers comprises at least 7 internucleotidic linkages in the Sp configuration. In some embodiments, a common pattern of backbone chiral centers comprises at least 8 internucleotidic linkages in the Sp configuration. In some embodiments, a common pattern of backbone chiral centers comprises at least 9 internucleotidic linkages in the Sp configuration. In some embodiments, a common pattern of backbone chiral centers comprises at least 10 internucleotidic linkages in the Sp configuration. In some embodiments, a common pattern of backbone chiral centers comprises at least 11 internucleotidic linkages in the Sp configuration. In some embodiments, a common pattern of backbone chiral centers comprises at least 12 internucleotidic linkages in the Sp configuration. In some embodiments, a common pattern of backbone chiral centers comprises at least 13 internucleotidic linkages in the Sp configuration. In some embodiments, a common pattern of backbone chiral centers comprises at least 14 internucleotidic linkages in the Sp configuration. In some embodiments, a common pattern of backbone chiral centers comprises at least 15 internucleotidic linkages in the Sp configuration. In some embodiments, a common pattern of backbone chiral centers comprises at least 16 internucleotidic linkages in the Sp configuration. In some embodiments, a common pattern of backbone chiral centers comprises at least 17 internucleotidic linkages in the Sp configuration. In some embodiments, a common pattern of backbone chiral centers comprises at least 18 internucleotidic linkages in the Sp configuration. In some embodiments, a common pattern of backbone chiral centers comprises at least 19 internucleotidic linkages in the Sp configuration. In some embodiments, a common pattern of backbone chiral centers comprises no more than 8 internucleotidic linkages in the Rp configuration. In some embodiments, a common pattern of backbone chiral centers comprises no more than 7 internucleotidic linkages in the Rp configuration. In some embodiments, a common pattern of backbone chiral centers comprises no more than 6 internucleotidic linkages in the Rp configuration. In some embodiments, a common pattern of backbone chiral centers comprises no more than 5 internucleotidic linkages in the Rp configuration. In some embodiments, a common pattern of backbone chiral centers comprises no more than 4 internucleotidic linkages in the Rp configuration. In some embodiments, a common pattern of backbone chiral centers comprises no more than 3 internucleotidic linkages in the Rp configuration. In some embodiments, a common pattern of backbone chiral centers comprises no more than 2 internucleotidic linkages in the Rp configuration. In some embodiments, a common pattern of backbone chiral centers comprises no more than 1 internucleotidic linkages in the Rp configuration. In some embodiments, a common pattern of backbone chiral centers comprises no more than 8 internucleotidic linkages which are not chiral (as a non-limiting example, a phosphodiester). In some embodiments, a common pattern of backbone chiral centers comprises no more than 7 internucleotidic linkages which are not chiral. In some embodiments, a common pattern of backbone chiral centers comprises no more than 6 internucleotidic linkages which are not chiral. In some embodiments, a common pattern of backbone chiral centers comprises no more than 5 internucleotidic linkages which are not chiral. In some embodiments, a common pattern of backbone chiral centers comprises no more than 4 internucleotidic linkages which are not chiral. In some embodiments, a common pattern of backbone chiral centers comprises no more than 3 internucleotidic linkages which are not chiral. In some embodiments, a common pattern of backbone chiral centers comprises no more than 2 internucleotidic linkages which are not chiral. In some embodiments, a common pattern of backbone chiral centers comprises no more than 1 internucleotidic linkages which are not chiral. In some embodiments, a common pattern of backbone chiral centers comprises at least 10 internucleotidic linkages in the Sp configuration, and no more than 8 internucleotidic linkages which are not chiral. In some embodiments, a common pattern of backbone chiral centers comprises at least 11 internucleotidic linkages in the Sp configuration, and no more than 7 internucleotidic linkages which are not chiral. In some embodiments, a common pattern of backbone chiral centers comprises at least 12 internucleotidic linkages in the Sp configuration, and no more than 6 internucleotidic linkages which are not chiral. In some embodiments, a common pattern of backbone chiral centers comprises at least 13 internucleotidic linkages in the Sp configuration, and no more than 6 internucleotidic linkages which are not chiral. In some embodiments, a common pattern of backbone chiral centers comprises at least 14 internucleotidic linkages in the Sp configuration, and no more than 5 internucleotidic linkages which are not chiral. In some embodiments, a common pattern of backbone chiral centers comprises at least 15 internucleotidic linkages in the Sp configuration, and no more than 4 internucleotidic linkages which are not chiral. In some embodiments, the internucleotidic linkages in the Sp configuration are optionally contiguous or not contiguous. In some embodiments, the internucleotidic linkages in the Rp configuration are optionally contiguous or not contiguous. In some embodiments, the internucleotidic linkages which are not chiral are optionally contiguous or not contiguous.

[0466] In some embodiments, compound of the disclosure comprises a block is a stereochemistry block. In some embodiments, a block is an Rp block in that each internucleotidic linkage of the block is Rp. In some embodiments, a 5′-block is an Rp block. In some embodiments, a 3′-block is an Rp block. In some embodiments, a block is an Sp block in that each internucleotidic linkage of the block is Sp. In some embodiments, a 5′-block is an Sp block. In some embodiments, a 3′-block is an Sp block. In some embodiments, provided oligonucleotides comprise both Rp and Sp blocks. In some embodiments, provided oligonucleotides comprise one or more Rp but no Sp blocks. In some embodiments, provided oligonucleotides comprise one or more Sp but no Rp blocks. In some embodiments, provided oligonucleotides comprise one or more PO blocks wherein each internucleotidic linkage in a natural phosphate linkage.

[0467] In some embodiments, compound of the disclosure comprises a 5′-block is an Sp block wherein each sugar moiety comprises a 2′-F modification. In some embodiments, a 5′-block is an Sp block wherein each of internucleotidic linkage is a modified internucleotidic linkage and each sugar moiety comprises a 2′-F modification. In some embodiments, a 5′-block is an Sp block wherein each of internucleotidic linkage is a phosphorothioate linkage and each sugar moiety comprises a 2′-F modification. In some embodiments, a 5′-block comprises 4 or more nucleoside units. In some embodiments, a 5′-block comprises 5 or more nucleoside units. In some embodiments, a 5′-block comprises 6 or more nucleoside units. In some embodiments, a 5′-block comprises 7 or more nucleoside units. In some embodiments, a 3′-block is an Sp block wherein each sugar moiety comprises a 2′-F modification. In some embodiments, a 3′-block is an Sp block wherein each of internucleotidic linkage is a modified internucleotidic linkage and each sugar moiety comprises a 2′-F modification. In some embodiments, a 3′-block is an Sp block wherein each of internucleotidic linkage is a phosphorothioate linkage and each sugar moiety comprises a 2′-F modification. In some embodiments, a 3′-block comprises 4 or more nucleoside units. In some embodiments, a 3′-block comprises 5 or more nucleoside units. In some embodiments, a 3′-block comprises 6 or more nucleoside units. In some embodiments, a 3′-block comprises 7 or more nucleoside units.

[0468] In some embodiments, compound of the disclosure comprises a type of nucleoside in a region or an oligonucleotide is followed by a specific type of internucleotidic linkage, e.g., natural phosphate linkage, modified internucleotidic linkage, Rp chiral internucleotidic linkage, Sp chiral internucleotidic linkage, etc. In some embodiments, A is followed by Sp. In some embodiments, A is followed by Rp. In some embodiments, A is followed by natural phosphate linkage (PO). In some embodiments, U is followed by Sp. In some embodiments, U is followed by Rp. In some embodiments, U is followed by natural phosphate linkage (PO). In some embodiments, C is followed by Sp. In some embodiments, C is followed by Rp. In some embodiments, C is followed by natural phosphate linkage (PO). In some embodiments, G is followed by Sp. In some embodiments, G is followed by Rp. In some embodiments, G is followed by natural phosphate linkage (PO). In some embodiments, C and U are followed by Sp. In some embodiments, C and U are followed by Rp. In some embodiments, C and U are followed by natural phosphate linkage (PO). In some embodiments, A and G are followed by Sp. In some embodiments, A and G are followed by Rp.

[0469] In some embodiments, the antisense strand comprises phosphorothioate internucleotide linkages between nucleotide positions 21 and 22, and between nucleotide positions 22 and 23, wherein the antisense strand contains at least one thermally destabilizing modification of the duplex located in the seed region of the antisense strand (i.e., at position 2-9 of the 5′-end of the antisense strand), and wherein the dsRNA optionally further has at least one (e.g., one, two, three, four, five, six, seven or all eight) of the following characteristics: (i) the antisense comprises 2, 3, 4, 5 or 6 2′-fluoro modifications; (ii) the antisense comprises 3, 4 or 5 phosphorothioate internucleotide linkages; (iii) the sense strand is conjugated with a ligand; (iv) the sense strand comprises 2, 3, 4 or 5 2′-fluoro modifications; (v) the sense strand comprises 1, 2, 3, 4 or 5 phosphorothioate internucleotide linkages; (vi) the dsRNA comprises at least four 2′-fluoro modifications; (vii) the dsRNA comprises a duplex region of 12-40 nucleotide pairs in length; and (viii) the dsRNA has a blunt end at 5′-end of the antisense strand.

[0470] In some embodiments, the antisense strand comprises phosphorothioate internucleotide linkages between nucleotide positions 1 and 2, between nucleotide positions 2 and 3, between nucleotide positions 21 and 22, and between nucleotide positions 22 and 23, wherein the antisense strand contains at least one thermally destabilizing modification of the duplex located in the seed region of the antisense strand (i.e., at position 2-9 of the 5′-end of the antisense strand), and wherein the dsRNA optionally further has at least one (e.g., one, two, three, four, five, six, seven or all eight) of the following characteristics: (i) the antisense comprises 2, 3, 4, 5 or 6 2′-fluoro modifications; (ii) the sense strand is conjugated with a ligand; (iii) the sense strand comprises 2, 3, 4 or 5 2′-fluoro modifications; (iv) the sense strand comprises 1, 2, 3, 4 or 5 phosphorothioate internucleotide linkages; (v) the dsRNA comprises at least four 2′-fluoro modifications; (vi) the dsRNA comprises a duplex region of 12-40 nucleotide pairs in length; (vii) the dsRNA comprises a duplex region of 12-40 nucleotide pairs in length; and (viii) the dsRNA has a blunt end at 5′-end of the antisense strand.

[0471] In some embodiments, the sense strand comprises phosphorothioate internucleotide linkages between nucleotide positions 1 and 2, and between nucleotide positions 2 and 3, wherein the antisense strand contains at least one thermally destabilizing modification of the duplex located in the seed region of the antisense strand (i.e., at position 2-9 of the 5′-end of the antisense strand), and wherein the dsRNA optionally further has at least one (e.g., one, two, three, four, five, six, seven or all eight) of the following characteristics: (i) the antisense comprises 2, 3, 4, 5 or 6 2′-fluoro modifications; (ii) the antisense comprises 1, 2, 3, 4 or 5 phosphorothioate internucleotide linkages; (iii) the sense strand is conjugated with a ligand; (iv) the sense strand comprises 2, 3, 4 or 5 2′-fluoro modifications; (v) the sense strand comprises 3, 4 or 5 phosphorothioate internucleotide linkages; (vi) the dsRNA comprises at least four 2′-fluoro modifications; (vii) the dsRNA comprises a duplex region of 12-40 nucleotide pairs in length; and (viii) the dsRNA has a blunt end at 5′-end of the antisense strand.

[0472] In some embodiments, the sense strand comprises phosphorothioate internucleotide linkages between nucleotide positions 1 and 2, and between nucleotide positions 2 and 3, the antisense strand comprises phosphorothioate internucleotide linkages between nucleotide positions 1 and 2, between nucleotide positions 2 and 3, between nucleotide positions 21 and 22, and between nucleotide positions 22 and 23, wherein the antisense strand contains at least one thermally destabilizing modification of the duplex located in the seed region of the antisense strand (i.e., at position 2-9 of the 5′-end of the antisense strand), and wherein the dsRNA optionally further has at least one (e.g., one, two, three, four, five, six or all seven) of the following characteristics: (i) the antisense comprises 2, 3, 4, 5 or 6 2′-fluoro modifications; (ii) the sense strand is conjugated with a ligand; (iii) the sense strand comprises 2, 3, 4 or 5 2′-fluoro modifications; (iv) the sense strand comprises 3, 4 or 5 phosphorothioate internucleotide linkages; (v) the dsRNA comprises at least four 2′-fluoro modifications; (vi) the dsRNA comprises a duplex region of 12-40 nucleotide pairs in length; and (vii) the dsRNA has a blunt end at 5′-end of the antisense strand.

[0473] In some embodiments, the dsRNA molecule of the disclosure comprises mismatch(es) with the target, within the duplex, or combinations thereof. The mismatch can occur in the overhang region or the duplex region. The base pair can be ranked on the basis of their propensity to promote dissociation or melting (e.g., on the free energy of association or dissociation of a particular pairing, the simplest approach is to examine the pairs on an individual pair basis, though next neighbor or similar analysis can also be used). In terms of promoting dissociation: A:U is preferred over G:C; G:U is preferred over G:C; and I:C is preferred over G:C (I=inosine). Mismatches, e.g., non-canonical or other than canonical pairings (as described elsewhere herein) are preferred over canonical (A:T, A:U, G:C) pairings; and pairings which include a universal base are preferred over canonical pairings.

[0474] In some embodiments, the dsRNA molecule of the disclosure comprises at least one of the first 1, 2, 3, 4, or 5 base pairs within the duplex regions from the 5′-end of the antisense strand can be chosen independently from the group of: A:U, G:U, I:C, and mismatched pairs, e.g., non-canonical or other than canonical pairings or pairings which include a universal base, to promote the dissociation of the antisense strand at the 5′-end of the duplex.

[0475] In some embodiments, the nucleotide at the 1 position within the duplex region from the 5′-end in the antisense strand is selected from the group consisting of A, dA, dU, U, and dT. Alternatively, at least one of the first 1, 2 or 3 base pair within the duplex region from the 5′-end of the antisense strand is an AU base pair. For example, the first base pair within the duplex region from the 5′-end of the antisense strand is an AU base pair.

[0476] It was found that introducing 4′-modified or 5′-modified nucleotide to the 3′-end of a phosphodiester (PO), phosphorothioate (PS), or phosphorodithioate (PS2) linkage of a dinucleotide at any position of single stranded or double stranded oligonucleotide can exert steric effect to the internucleotide linkage and, hence, protecting or stabilizing it against nucleases.

[0477] In some embodiments, 5′-modified nucleoside is introduced at the 3′-end of a dinucleotide at any position of single stranded or double stranded siRNA. For instance, a 5′-alkylated nucleoside may be introduced at the 3′-end of a dinucleotide at any position of single stranded or double stranded siRNA. The alkyl group at the 5′ position of the ribose sugar can be racemic or chirally pure R or S isomer. An exemplary 5′-alkylated nucleoside is 5′-methyl nucleoside. The 5′-methyl can be either racemic or chirally pure R or S isomer.

[0478] In some embodiments, 4′-modified nucleoside is introduced at the 3′-end of a dinucleotide at any position of single stranded or double stranded siRNA. For instance, a 4′-alkylated nucleoside may be introduced at the 3′-end of a dinucleotide at any position of single stranded or double stranded siRNA. The alkyl group at the 4′ position of the ribose sugar can be racemic or chirally pure R or S isomer. An exemplary 4′-alkylated nucleoside is 4′-methyl nucleoside. The 4′-methyl can be either racemic or chirally pure R or S isomer. Alternatively, a 4′-O-alkylated nucleoside may be introduced at the 3′-end of a dinucleotide at any position of single stranded or double stranded siRNA. The 4′-O-alkyl of the ribose sugar can be racemic or chirally pure R or S isomer. An exemplary 4′-O-alkylated nucleoside is 4′-O-methyl nucleoside. The 4′-O-methyl can be either racemic or chirally pure R or S isomer.

[0479] In some embodiments, 5′-alkylated nucleoside is introduced at any position on the sense strand or antisense strand of a dsRNA, and such modification maintains or improves potency of the dsRNA. The 5′-alkyl can be either racemic or chirally pure R or S isomer. An exemplary 5′-alkylated nucleoside is 5′-methyl nucleoside. The 5′-methyl can be either racemic or chirally pure R or S isomer.

[0480] In some embodiments, 4′-alkylated nucleoside is introduced at any position on the sense strand or antisense strand of a dsRNA, and such modification maintains or improves potency of the dsRNA. The 4′-alkyl can be either racemic or chirally pure R or S isomer. An exemplary 4′-alkylated nucleoside is 4′-methyl nucleoside. The 4′-methyl can be either racemic or chirally pure R or S isomer.

[0481] In some embodiments, 4′-O-alkylated nucleoside is introduced at any position on the sense strand or antisense strand of a dsRNA, and such modification maintains or improves potency of the dsRNA. The 5′-alkyl can be either racemic or chirally pure R or S isomer. An exemplary 4′-O-alkylated nucleoside is 4′-O-methyl nucleoside. The 4′-O-methyl can be either racemic or chirally pure R or S isomer.

[0482] In some embodiments, the dsRNA molecule of the disclosure can comprise 2′-5′ linkages (with 2′-H, 2′-OH and 2′-OMe and with P═O or P═S). For example, the 2′-5′ linkages modifications can be used to promote nuclease resistance or to inhibit binding of the sense to the antisense strand, or can be used at the 5′ end of the sense strand to avoid sense strand activation by RISC.

[0483] In another embodiment, the dsRNA molecule of the disclosure can comprise L sugars (e.g., L ribose, L-arabinose with 2′-H, 2′-OH and 2′-OMe). For example, these L sugars modifications can be used to promote nuclease resistance or to inhibit binding of the sense to the antisense strand, or can be used at the 5′ end of the sense strand to avoid sense strand activation by RISC.

[0484] Various publications describe multimeric siRNA which can all be used with the dsRNA of the disclosure. Such publications include WO2007/091269, U.S. Pat. No. 7,858,769, WO2010/141511, WO2007/117686, WO2009/014887, and WO2011/031520 which are hereby incorporated by their entirely.

[0485] As described in more detail below, the RNAi agent that contains conjugations of one or more carbohydrate moieties to an RNAi agent can optimize one or more properties of the RNAi agent. In many cases, the carbohydrate moiety will be attached to a modified subunit of the RNAi agent. For example, the ribose sugar of one or more ribonucleotide subunits of a dsRNA agent can be replaced with another moiety, e.g., a non-carbohydrate (preferably cyclic) carrier to which is attached a carbohydrate ligand. A ribonucleotide subunit in which the ribose sugar of the subunit has been so replaced is referred to herein as a ribose replacement modification subunit (RRMS). A cyclic carrier may be a carbocyclic ring system, i.e., all ring atoms are carbon atoms, or a heterocyclic ring system, i.e., one or more ring atoms may be a heteroatom, e.g., nitrogen, oxygen, sulfur. The cyclic carrier may be a monocyclic ring system, or may contain two or more rings, e.g. fused rings. The cyclic carrier may be a fully saturated ring system, or it may contain one or more double bonds.

[0486] The ligand may be attached to the polynucleotide via a carrier. The carriers include (i) at least one “backbone attachment point,” preferably two “backbone attachment points” and (ii) at least one “tethering attachment point.” A “backbone attachment point” as used herein refers to a functional group, e.g. a hydroxyl group, or generally, a bond available for, and that is suitable for incorporation of the carrier into the backbone, e.g., the phosphate, or modified phosphate, e.g., sulfur containing, backbone, of a ribonucleic acid. A “tethering attachment point” (TAP) in some embodiments refers to a constituent ring atom of the cyclic carrier, e.g., a carbon atom or a heteroatom (distinct from an atom which provides a backbone attachment point), that connects a selected moiety. The moiety can be, e.g., a carbohydrate, e.g. monosaccharide, disaccharide, trisaccharide, tetrasaccharide, oligosaccharide and polysaccharide. Optionally, the selected moiety is connected by an intervening tether to the cyclic carrier. Thus, the cyclic carrier will often include a functional group, e.g., an amino group, or generally, provide a bond, that is suitable for incorporation or tethering of another chemical entity, e.g., a ligand to the constituent ring.

[0487] The RNAi agents may be conjugated to a ligand via a carrier, wherein the carrier can be cyclic group or acyclic group; preferably, the cyclic group is selected from pyrrolidinyl, pyrazolinyl, pyrazolidinyl, imidazolinyl, imidazolidinyl, piperidinyl, piperazinyl, [1,3]dioxolane, oxazolidinyl, isoxazolidinyl, morpholinyl, thiazolidinyl, isothiazolidinyl, quinoxalinyl, pyridazinonyl, tetrahydrofuryl and decalin; preferably, the acyclic group is selected from serinol backbone or diethanolamine backbone.

[0488] In certain specific embodiments, the RNAi agent for use in the methods of the disclosure is an agent selected from the group of agents listed in any one of Tables 2-14. These agents may further comprise a ligand.

### IV. iRNAs Conjugated to Ligands

[0489] Another modification of the RNA of an iRNA of the invention involves chemically linking to the iRNA one or more ligands, moieties or conjugates that enhance the activity, cellular distribution or cellular uptake of the iRNA, e.g., into a cell. Such moieties include but are not limited to lipid moieties such as a cholesterol moiety (Letsinger et al., Proc. Natl. Acid. Sci. USA, 1989, 86: 6553-6556), cholic acid (Manoharan et al., Biorg. Med. Chem. Let., 1994, 4:1053-1060), a thioether, e.g., beryl-S-tritylthiol (Manoharan et al., Ann. N.Y. Acad. Sci., 1992, 660:306-309; Manoharan et al., Biorg. Med. Chem. Let., 1993, 3:2765-2770), a thiocholesterol (Oberhauser et al., Nucl. Acids Res., 1992, 20:533-538), an aliphatic chain, e.g., dodecandiol or undecyl residues (Saison-Behmoaras et al., EMBO J, 1991, 10:1111-1118; Kabanov et al., FEBS Lett., 1990, 259:327-330; Svinarchuk et al., Biochimie, 1993, 75:49-54), a phospholipid, e.g., di-hexadecyl-rac-glycerol or triethyl-ammonium 1,2-di-O-hexadecyl-rac-glycero-3-phosphonate (Manoharan et al., Tetrahedron Lett., 1995, 36:3651-3654; Shea et al., Nucl. Acids Res., 1990, 18:3777-3783), a polyamine or a polyethylene glycol chain (Manoharan et al., Nucleosides & Nucleotides, 1995, 14:969-973), or adamantane acetic acid (Manoharan et al., Tetrahedron Lett., 1995, 36:3651-3654), a palmityl moiety (Mishra et al., Biochim. Biophys. Acta, 1995, 1264:229-237), or an octadecylamine or hexylamino-carbonyloxycholesterol moiety (Crooke et al., J. Pharmacol. Exp. Ther., 1996, 277:923-937).

[0490] In certain embodiments, a ligand alters the distribution, targeting or lifetime of an iRNA agent into which it is incorporated. In some embodiments, a ligand provides an enhanced affinity for a selected target, e.g., molecule, cell or cell type, compartment, e.g., a cellular or organ compartment, tissue, organ or region of the body, as, e.g., compared to a species absent such a ligand. Typical ligands will not take part in duplex pairing in a duplexed nucleic acid.

[0491] Ligands can include a naturally occurring substance, such as a protein (e.g., human serum albumin (HSA), low-density lipoprotein (LDL), or globulin); carbohydrate (e.g., a dextran, pullulan, chitin, chitosan, inulin, cyclodextrin or hyaluronic acid); or a lipid. The ligand may also be a recombinant or synthetic molecule, such as a synthetic polymer, e.g., a synthetic polyamino acid. Examples of polyamino acids include polyamino acid is a polylysine (PLL), poly L-aspartic acid, poly L-glutamic acid, styrene-maleic acid anhydride copolymer, poly(L-lactide-co-glycolied) copolymer, divinyl ether-maleic anhydride copolymer, N-(2-hydroxypropyl)methacrylamide copolymer (HMPA), polyethylene glycol (PEG), polyvinyl alcohol (PVA), polyurethane, poly(2-ethylacryllic acid), N-isopropylacrylamide polymers, or polyphosphazine. Example of polyamines include: polyethylenimine, polylysine (PLL), spermine, spermidine, polyamine, pseudopeptide-polyamine, peptidomimetic polyamine, dendrimer polyamine, arginine, amidine, protamine, cationic lipid, cationic porphyrin, quaternary salt of a polyamine, or an α helical peptide.

[0492] Ligands can also include targeting groups, e.g., a cell or tissue targeting agent, e.g., a lectin, glycoprotein, lipid or protein, e.g., an antibody, that binds to a specified cell type such as a kidney cell. A targeting group can be a thyrotropin, melanotropin, lectin, glycoprotein, surfactant protein A, Mucin carbohydrate, multivalent lactose, multivalent galactose, N-acetyl-galactosamine, N-acetyl-glucosamine multivalent mannose, multivalent fucose, glycosylated polyaminoacids, multivalent galactose, transferrin, bisphosphonate, polyglutamate, polyaspartate, a lipid, cholesterol, a steroid, bile acid, folate, vitamin B12, biotin, or an RGD peptide or RGD peptide mimetic. In certain embodiments, the ligand is a multivalent galactose, e.g., an N-acetyl-galactosamine.

[0493] Other examples of ligands include dyes, intercalating agents (e.g. acridines), cross-linkers (e.g. psoralene, mitomycin C), porphyrins (TPPC4, texaphyrin, Sapphyrin), polycyclic aromatic hydrocarbons (e.g., phenazine, dihydrophenazine), artificial endonucleases (e.g. EDTA), lipophilic molecules, e.g., cholesterol, cholic acid, adamantane acetic acid, 1-pyrene butyric acid, dihydrotestosterone, 1,3-Bis-O(hexadecyl)glycerol, geranyloxyhexyl group, hexadecylglycerol, borneol, menthol, 1,3-propanediol, heptadecyl group, palmitic acid, myristic acid, O3-(oleoyl)lithocholic acid, 03-(oleoyl)cholenic acid, dimethoxytrityl, or phenoxazine) and peptide conjugates (e.g., antennapedia peptide, Tat peptide), alkylating agents, phosphate, amino, mercapto, PEG (e.g., PEG-40K), MPEG, [MPEG]₂, polyamino, alkyl, substituted alkyl, radiolabeled markers, enzymes, haptens (e.g. biotin), transport/absorption facilitators (e.g., aspirin, vitamin E, folic acid), synthetic ribonucleases (e.g., imidazole, bisimidazole, histamine, imidazole clusters, acridine-imidazole conjugates, Eu3+ complexes of tetraazamacrocycles), dinitrophenyl, HRP, or AP.

[0494] Ligands can be proteins, e.g., glycoproteins, or peptides, e.g., molecules having a specific affinity for a co-ligand, or antibodies e.g., an antibody, that binds to a specified cell type such as a cancer cell, endothelial cell, or bone cell. Ligands may also include hormones and hormone receptors. They can also include non-peptidic species, such as lipids, lectins, carbohydrates, vitamins, cofactors, multivalent lactose, multivalent galactose, N-acetyl-galactosamine, N-acetyl-glucosamine multivalent mannose, or multivalent fucose. The ligand can be, for example, a lipopolysaccharide, an activator of p38 MAP kinase, or an activator of NF-κB.

[0495] The ligand can be a substance, e.g., a drug, which can increase the uptake of the iRNA agent into the cell, for example, by disrupting the cell's cytoskeleton, e.g., by disrupting the cell's microtubules, microfilaments, or intermediate filaments. The drug can be, for example, taxon, vincristine, vinblastine, cytochalasin, nocodazole, japlakinolide, latrunculin A, phalloidin, swinholide A, indanocine, or myoservin.

[0496] In some embodiments, a ligand attached to an iRNA as described herein acts as a pharmacokinetic modulator (PK modulator). PK modulators include lipophiles, bile acids, steroids, phospholipid analogues, peptides, protein binding agents, PEG, vitamins etc. Exemplary PK modulators include, but are not limited to, cholesterol, fatty acids, cholic acid, lithocholic acid, dialkylglycerides, diacylglyceride, phospholipids, sphingolipids, naproxen, ibuprofen, vitamin E, biotin etc. Oligonucleotides that comprise a number of phosphorothioate linkages are also known to bind to serum protein, thus short oligonucleotides, e.g., oligonucleotides of about 5 bases, 10 bases, 15 bases or 20 bases, comprising multiple of phosphorothioate linkages in the backbone are also amenable to the present invention as ligands (e.g. as PK modulating ligands). In addition, aptamers that bind serum components (e.g. serum proteins) are also suitable for use as PK modulating ligands in the embodiments described herein.

[0497] Ligand-conjugated iRNAs of the invention may be synthesized by the use of an oligonucleotide that bears a pendant reactive functionality, such as that derived from the attachment of a linking molecule onto the oligonucleotide (described below). This reactive oligonucleotide may be reacted directly with commercially-available ligands, ligands that are synthesized bearing any of a variety of protecting groups, or ligands that have a linking moiety attached thereto.

[0498] The oligonucleotides used in the conjugates of the present invention may be conveniently and routinely made through the well-known technique of solid-phase synthesis. Equipment for such synthesis is sold by several vendors including, for example, Applied Biosystems® (Foster City, Calif.). Any other means for such synthesis known in the art may additionally or alternatively be employed. It is also known to use similar techniques to prepare other oligonucleotides, such as the phosphorothioates and alkylated derivatives.

[0499] In the ligand-conjugated oligonucleotides and ligand-molecule bearing sequence-specific linked nucleosides of the present invention, the oligonucleotides and oligonucleosides may be assembled on a suitable DNA synthesizer utilizing standard nucleotide or nucleoside precursors, or nucleotide or nucleoside conjugate precursors that already bear the linking moiety, ligand-nucleotide or nucleoside-conjugate precursors that already bear the ligand molecule, or non-nucleoside ligand-bearing building blocks.

[0500] When using nucleotide-conjugate precursors that already bear a linking moiety, the synthesis of the sequence-specific linked nucleosides is typically completed, and the ligand molecule is then reacted with the linking moiety to form the ligand-conjugated oligonucleotide. In some embodiments, the oligonucleotides or linked nucleosides of the present invention are synthesized by an automated synthesizer using phosphoramidites derived from ligand-nucleoside conjugates in addition to the standard phosphoramidites and non-standard phosphoramidites that are commercially available and routinely used in oligonucleotide synthesis.

[0501] A. Lipid Conjugates

[0502] In certain embodiments, the ligand or conjugate is a lipid or lipid-based molecule. Such a lipid or lipid-based molecule can typically bind a serum protein, such as human serum albumin (HSA). An HSA binding ligand allows for distribution of the conjugate to a target tissue, e.g., a non-kidney target tissue of the body. For example, the target tissue can be the liver, including parenchymal cells of the liver. Other molecules that can bind HSA can also be used as ligands. For example, naproxen or aspirin can be used. A lipid or lipid-based ligand can (a) increase resistance to degradation of the conjugate, (b) increase targeting or transport into a target cell or cell membrane, or (c) can be used to adjust binding to a serum protein, e.g., HSA.

[0503] A lipid-based ligand can be used to modulate, e.g., control (e.g., inhibit) the binding of the conjugate to a target tissue. For example, a lipid or lipid-based ligand that binds to HSA more strongly will be less likely to be targeted to the kidney and therefore less likely to be cleared from the body. A lipid or lipid-based ligand that binds to HSA less strongly can be used to target the conjugate to the kidney.

[0504] In certain embodiments, the lipid-based ligand binds HSA. For example, the ligand can bind HSA with a sufficient affinity such that distribution of the conjugate to a non-kidney tissue is enhanced. However, the affinity is typically not so strong that the HSA-ligand binding cannot be reversed.

[0505] In certain embodiments, the lipid-based ligand binds HSA weakly or not at all, such that distribution of the conjugate to the kidney is enhanced. Other moieties that target to kidney cells can also be used in place of or in addition to the lipid-based ligand.

[0506] In another aspect, the ligand is a moiety, e.g., a vitamin, which is taken up by a target cell, e.g., a proliferating cell. These are particularly useful for treating disorders characterized by unwanted cell proliferation, e.g., of the malignant or non-malignant type, e.g., cancer cells. Exemplary vitamins include vitamin A, E, and K. Other exemplary vitamins include are B vitamin, e.g., folic acid, B12, riboflavin, biotin, pyridoxal or other vitamins or nutrients taken up by cancer cells. Also included are HSA and low density lipoprotein (LDL).

[0507] B. Cell Permeation Agents

[0508] In another aspect, the ligand is a cell-permeation agent, such as a helical cell-permeation agent. In certain embodiments, the agent is amphipathic. An exemplary agent is a peptide such as that or antennapedia. If the agent is a peptide, it can be modified, including a peptidylmimetic, invertomers, non-peptide or pseudo-peptide linkages, and use of D-amino acids. The helical agent is typically an α-helical agent and can have a lipophilic and a lipophobic phase.

[0509] The ligand can be a peptide or peptidomimetic. A peptidomimetic (also referred to herein as an oligopeptidomimetic) is a molecule capable of folding into a defined three-dimensional structure similar to a natural peptide. The attachment of peptide and peptidomimetics to iRNA agents can affect pharmacokinetic distribution of the iRNA, such as by enhancing cellular recognition and absorption. The peptide or peptidomimetic moiety can be about 5-50 amino acids long, e.g., about 5, 10, 15, 20, 25, 30, 35, 40, 45, or 50 amino acids long.

[0510] A peptide or peptidomimetic can be, for example, a cell permeation peptide, cationic peptide, amphipathic peptide, or hydrophobic peptide (e.g., consisting primarily of Tyr, Trp, or Phe). The peptide moiety can be a dendrimer peptide, constrained peptide or crosslinked peptide. In another alternative, the peptide moiety can include a hydrophobic membrane translocation sequence (MTS). An exemplary hydrophobic MTS-containing peptide is RFGF having the amino acid sequence AAVALLPAVLLALLAP (SEQ ID NO: 18). An RFGF analogue (e.g., amino acid sequence AALLPVLLAAP (SEQ ID NO: 19)) containing a hydrophobic MTS can also be a targeting moiety. The peptide moiety can be a “delivery” peptide, which can carry large polar molecules including peptides, oligonucleotides, and protein across cell membranes. For example, sequences from the HIV Tat protein (GRKKRRQRRRPPQ (SEQ ID NO: 20)) and the Drosophila Antennapedia protein (RQIKIWFQNRRMKWKK (SEQ ID NO: 21)) have been found to be capable of functioning as delivery peptides. A peptide or peptidomimetic can be encoded by a random sequence of DNA, such as a peptide identified from a phage-display library, or one-bead-one-compound (OBOC) combinatorial library (Lam et al., Nature, 354:82-84, 1991). Typically, the peptide or peptidomimetic tethered to a dsRNA agent via an incorporated monomer unit is a cell targeting peptide such as an arginine-glycine-aspartic acid (RGD)-peptide, or RGD mimic A peptide moiety can range in length from about 5 amino acids to about 40 amino acids. The peptide moieties can have a structural modification, such as to increase stability or direct conformational properties. Any of the structural modifications described below can be utilized.

[0511] An RGD peptide for use in the compositions and methods of the invention may be linear or cyclic, and may be modified, e.g., glycosylated or methylated, to facilitate targeting to a specific tissue(s). RGD-containing peptides and peptidomimetics may include D-amino acids, as well as synthetic RGD mimics. In addition to RGD, one can use other moieties that target the integrin ligand. Preferred conjugates of this ligand target PECAM-1 or VEGF.

[0512] An RGD peptide moiety can be used to target a particular cell type, e.g., a tumor cell, such as an endothelial tumor cell or a breast cancer tumor cell (Zitzmann et al., Cancer Res., 62:5139-43, 2002). An RGD peptide can facilitate targeting of an dsRNA agent to tumors of a variety of other tissues, including the lung, kidney, spleen, or liver (Aoki et al., Cancer Gene Therapy 8:783-787, 2001). Typically, the RGD peptide will facilitate targeting of an iRNA agent to the kidney. The RGD peptide can be linear or cyclic, and can be modified, e.g., glycosylated or methylated to facilitate targeting to specific tissues. For example, a glycosylated RGD peptide can deliver an iRNA agent to a tumor cell expressing αvβ₃ (Haubner et al., Jour. Nucl. Med., 42:326-336, 2001).

[0513] A “cell permeation peptide” is capable of permeating a cell, e.g., a microbial cell, such as a bacterial or fungal cell, or a mammalian cell, such as a human cell. A microbial cell-permeating peptide can be, for example, an α-helical linear peptide (e.g., LL-37 or Ceropin P1), a disulfide bond-containing peptide (e.g., α-defensin, β-defensin or bactenecin), or a peptide containing only one or two dominating amino acids (e.g., PR-39 or indolicidin). A cell permeation peptide can also include a nuclear localization signal (NLS). For example, a cell permeation peptide can be a bipartite amphipathic peptide, such as MPG, which is derived from the fusion peptide domain of HIV-1 gp41 and the NLS of SV40 large T antigen (Simeoni et al., Nucl. Acids Res. 31:2717-2724, 2003).

[0514] C. Carbohydrate Conjugates

[0515] In some embodiments of the compositions and methods of the invention, an iRNA further comprises a carbohydrate. The carbohydrate conjugated iRNA are advantageous for the in vivo delivery of nucleic acids, as well as compositions suitable for in vivo therapeutic use, as described herein. As used herein, “carbohydrate” refers to a compound which is either a carbohydrate per se made up of one or more monosaccharide units having at least 6 carbon atoms (which can be linear, branched or cyclic) with an oxygen, nitrogen or sulfur atom bonded to each carbon atom; or a compound having as a part thereof a carbohydrate moiety made up of one or more monosaccharide units each having at least six carbon atoms (which can be linear, branched or cyclic), with an oxygen, nitrogen or sulfur atom bonded to each carbon atom. Representative carbohydrates include the sugars (mono-, di-, tri- and oligosaccharides containing from about 4, 5, 6, 7, 8, or 9 monosaccharide units), and polysaccharides such as starches, glycogen, cellulose and polysaccharide gums. Specific monosaccharides include C5 and above (e.g., C5, C6, C7, or C8) sugars; di- and tri-saccharides include sugars having two or three monosaccharide units (e.g., C5, C6, C7, or C8).

[0516] In certain embodiments, a carbohydrate conjugate comprises a monosaccharide.

[0517] In certain embodiments, the monosaccharide is an N-acetylgalactosamine (GalNAc). GalNAc conjugates, which comprise one or more N-acetylgalactosamine (GalNAc) derivatives, are described, for example, in U.S. Pat. No. 8,106,022, the entire content of which is hereby incorporated herein by reference. In some embodiments, the GalNAc conjugate serves as a ligand that targets the iRNA to particular cells. In some embodiments, the GalNAc conjugate targets the iRNA to liver cells, e.g., by serving as a ligand for the asialoglycoprotein receptor of liver cells (e.g., hepatocytes).

[0518] In some embodiments, the carbohydrate conjugate comprises one or more GalNAc derivatives. The GalNAc derivatives may be attached via a linker, e.g., a bivalent or trivalent branched linker. In some embodiments the GalNAc conjugate is conjugated to the 3′ end of the sense strand. In some embodiments, the GalNAc conjugate is conjugated to the iRNA agent (e.g., to the 3′ end of the sense strand) via a linker, e.g., a linker as described herein. In some embodiments the GalNAc conjugate is conjugated to the 5′ end of the sense strand. In some embodiments, the GalNAc conjugate is conjugated to the iRNA agent (e.g., to the 5′ end of the sense strand) via a linker, e.g., a linker as described herein.

[0519] In certain embodiments of the invention, the GalNAc or GalNAc derivative is attached to an iRNA agent of the invention via a monovalent linker. In some embodiments, the GalNAc or GalNAc derivative is attached to an iRNA agent of the invention via a bivalent linker. In yet other embodiments of the invention, the GalNAc or GalNAc derivative is attached to an iRNA agent of the invention via a trivalent linker. In other embodiments of the invention, the GalNAc or GalNAc derivative is attached to an iRNA agent of the invention via a tetravalent linker.

[0520] In certain embodiments, the double stranded RNAi agents of the invention comprise one GalNAc or GalNAc derivative attached to the iRNA agent. In certain embodiments, the double stranded RNAi agents of the invention comprise a plurality (e.g., 2, 3, 4, 5, or 6) GalNAc or GalNAc derivatives, each independently attached to a plurality of nucleotides of the double stranded RNAi agent through a plurality of monovalent linkers.

[0521] In some embodiments, for example, when the two strands of an iRNA agent of the invention are part of one larger molecule connected by an uninterrupted chain of nucleotides between the 3′-end of one strand and the 5′-end of the respective other strand forming a hairpin loop comprising, a plurality of unpaired nucleotides, each unpaired nucleotide within the hairpin loop may independently comprise a GalNAc or GalNAc derivative attached via a monovalent linker. The hairpin loop may also be formed by an extended overhang in one strand of the duplex.

[0522] In some embodiments, for example, when the two strands of an iRNA agent of the invention are part of one larger molecule connected by an uninterrupted chain of nucleotides between the 3′-end of one strand and the 5′-end of the respective other strand forming a hairpin loop comprising, a plurality of unpaired nucleotides, each unpaired nucleotide within the hairpin loop may independently comprise a GalNAc or GalNAc derivative attached via a monovalent linker. The hairpin loop may also be formed by an extended overhang in one strand of the duplex.

[0523] In some embodiments, the GalNAc conjugate is

[chemical structure]

[0524] In some embodiments, the RNAi agent is attached to the carbohydrate conjugate via a linker as shown in the following schematic, wherein X is 0 or S

[chemical structure]

[0525] In some embodiments, the RNAi agent is conjugated to L96 as defined in Table 1 and shown below:

[chemical structure]

[0526] In certain embodiments, a carbohydrate conjugate for use in the compositions and methods of the invention is selected from the group consisting of:

[chemical structure]

[chemical structure]

[chemical structure]

[chemical structure]

[chemical structure]

[chemical structure]

[chemical structure]

[chemical structure]

[chemical structure]

[chemical structure]

[0527] In certain embodiments, a carbohydrate conjugate for use in the compositions and methods of the invention is a monosaccharide. In certain embodiments, the monosaccharide is an N-acetylgalactosamine, such as

[chemical structure]

[0528] Another representative carbohydrate conjugate for use in the embodiments described herein includes, but is not limited to.

[chemical structure]

[0529] when one of X or Y is an oligonucleotide, the other is a hydrogen.

[0530] In some embodiments, a suitable ligand is a ligand disclosed in WO 2019/055633, the entire contents of which are incorporated herein by reference. In one embodiment the ligand comprises the structure below:

[chemical structure]

[0531] In certain embodiments, the RNAi agents of the disclosure may include GalNAc ligands, even if such GalNAc ligands are currently projected to be of limited value for the preferred intrathecal/CNS delivery route(s) of the instant disclosure.

[0532] In certain embodiments of the invention, the GalNAc or GalNAc derivative is attached to an iRNA agent of the invention via a monovalent linker. In some embodiments, the GalNAc or GalNAc derivative is attached to an iRNA agent of the invention via a bivalent linker. In yet other embodiments of the invention, the GalNAc or GalNAc derivative is attached to an iRNA agent of the invention via a trivalent linker. In other embodiments of the invention, the GalNAc or GalNAc derivative is attached to an iRNA agent of the invention via a tetravalent linker.

[0533] In certain embodiments, the double stranded RNAi agents of the invention comprise one GalNAc or GalNAc derivative attached to the iRNA agent, e.g., the 5′ end of the sense strand of a dsRNA agent, or the 5′ end of one or both sense strands of a dual targeting RNAi agent as described herein. In certain embodiments, the double stranded RNAi agents of the invention comprise a plurality (e.g., 2, 3, 4, 5, or 6) GalNAc or GalNAc derivatives, each independently attached to a plurality of nucleotides of the double stranded RNAi agent through a plurality of monovalent linkers.

[0534] In some embodiments, for example, when the two strands of an iRNA agent of the invention are part of one larger molecule connected by an uninterrupted chain of nucleotides between the 3′-end of one strand and the 5′-end of the respective other strand forming a hairpin loop comprising, a plurality of unpaired nucleotides, each unpaired nucleotide within the hairpin loop may independently comprise a GalNAc or GalNAc derivative attached via a monovalent linker.

[0535] In some embodiments, the carbohydrate conjugate further comprises one or more additional ligands as described above, such as, but not limited to, a PK modulator or a cell permeation peptide.

[0536] Additional carbohydrate conjugates and linkers suitable for use in the present invention include those described in WO 2014/179620 and WO 2014/179627, the entire contents of each of which are incorporated herein by reference.

[0537] D. Linkers

[0538] In some embodiments, the conjugate or ligand described herein can be attached to an iRNA oligonucleotide with various linkers that can be cleavable or non-cleavable.

[0539] The term “linker” or “linking group” means an organic moiety that connects two parts of a compound, e.g., covalently attaches two parts of a compound. Linkers typically comprise a direct bond or an atom such as oxygen or sulfur, a unit such as NRB, C(O), C(O)NH, SO, SO₂, SO₂NH or a chain of atoms, such as, but not limited to, substituted or unsubstituted alkyl, substituted or unsubstituted alkenyl, substituted or unsubstituted alkynyl, arylalkyl, arylalkenyl, arylalkynyl, heteroarylalkyl, heteroarylalkenyl, heteroarylalkynyl, heterocyclylalkyl, heterocyclylalkenyl, heterocyclylalkynyl, aryl, heteroaryl, heterocyclyl, cycloalkyl, cycloalkenyl, alkylarylalkyl, alkylarylalkenyl, alkylarylalkynyl, alkenylarylalkyl, alkenylarylalkenyl, alkenylarylalkynyl, alkynylarylalkyl, alkynylarylalkenyl, alkynylarylalkynyl, alkylheteroarylalkyl, alkylheteroarylalkenyl, alkylheteroarylalkynyl, alkenylheteroarylalkyl, alkenylheteroarylalkenyl, alkenylheteroarylalkynyl, alkynylheteroarylalkyl, alkynylheteroarylalkenyl, alkynylheteroarylalkynyl, alkylheterocyclylalkyl, alkylheterocyclylalkenyl, alkylhererocyclylalkynyl, alkenylheterocyclylalkyl, alkenylheterocyclylalkenyl, alkenylheterocyclylalkynyl, alkynylheterocyclylalkyl, alkynylheterocyclylalkenyl, alkynylheterocyclylalkynyl, alkylaryl, alkenylaryl, alkynylaryl, alkylheteroaryl, alkenylheteroaryl, alkynylhereroaryl, which one or more methylenes can be interrupted or terminated by O, S, S(O), SO₂, N(R8), C(O), substituted or unsubstituted aryl, substituted or unsubstituted heteroaryl, substituted or unsubstituted heterocyclic; where R8 is hydrogen, acyl, aliphatic or substituted aliphatic. In certain embodiments, the linker is between about 1-24 atoms, 2-24, 3-24, 4-24, 5-24, 6-24, 6-18, 7-18, 8-18 atoms, 7-17, 8-17, 6-16, 7-16, or 8-16 atoms.

[0540] A cleavable linking group is one which is sufficiently stable outside the cell, but which upon entry into a target cell is cleaved to release the two parts the linker is holding together. In a preferred embodiment, the cleavable linking group is cleaved at least about 10 times, 20, times, 30 times, 40 times, 50 times, 60 times, 70 times, 80 times, 90 times or more, or at least about 100 times faster in a target cell or under a first reference condition (which can, e.g., be selected to mimic or represent intracellular conditions) than in the blood of a subject, or under a second reference condition (which can, e.g., be selected to mimic or represent conditions found in the blood or serum).

[0541] Cleavable linking groups are susceptible to cleavage agents, e.g., pH, redox potential or the presence of degradative molecules. Generally, cleavage agents are more prevalent or found at higher levels or activities inside cells than in serum or blood. Examples of such degradative agents include: redox agents which are selected for particular substrates or which have no substrate specificity, including, e.g., oxidative or reductive enzymes or reductive agents such as mercaptans, present in cells, that can degrade a redox cleavable linking group by reduction; esterases; endosomes or agents that can create an acidic environment, e.g., those that result in a pH of five or lower; enzymes that can hydrolyze or degrade an acid cleavable linking group by acting as a general acid, peptidases (which can be substrate specific), and phosphatases.

[0542] A cleavable linkage group, such as a disulfide bond can be susceptible to pH. The pH of human serum is 7.4, while the average intracellular pH is slightly lower, ranging from about 7.1-7.3. Endosomes have a more acidic pH, in the range of 5.5-6.0, and lysosomes have an even more acidic pH at around 5.0. Some linkers will have a cleavable linking group that is cleaved at a preferred pH, thereby releasing a cationic lipid from the ligand inside the cell, or into the desired compartment of the cell.

[0543] A linker can include a cleavable linking group that is cleavable by a particular enzyme. The type of cleavable linking group incorporated into a linker can depend on the cell to be targeted. For example, a liver-targeting ligand can be linked to a cationic lipid through a linker that includes an ester group. Liver cells are rich in esterases, and therefore the linker will be cleaved more efficiently in liver cells than in cell types that are not esterase-rich. Other cell-types rich in esterases include cells of the lung, renal cortex, and testis.

[0544] Linkers that contain peptide bonds can be used when targeting cell types rich in peptidases, such as liver cells and synoviocytes.

[0545] In general, the suitability of a candidate cleavable linking group can be evaluated by testing the ability of a degradative agent (or condition) to cleave the candidate linking group. It will also be desirable to also test the candidate cleavable linking group for the ability to resist cleavage in the blood or when in contact with other non-target tissue. Thus, one can determine the relative susceptibility to cleavage between a first and a second condition, where the first is selected to be indicative of cleavage in a target cell and the second is selected to be indicative of cleavage in other tissues or biological fluids, e.g., blood or serum. The evaluations can be carried out in cell free systems, in cells, in cell culture, in organ or tissue culture, or in whole animals. It can be useful to make initial evaluations in cell-free or culture conditions and to confirm by further evaluations in whole animals. In preferred embodiments, useful candidate compounds are cleaved at least about 2, 4, 10, 20, 30, 40, 50, 60, 70, 80, 90, or about 100 times faster in the cell (or under in vitro conditions selected to mimic intracellular conditions) as compared to blood or serum (or under in vitro conditions selected to mimic extracellular conditions).

[0546] i. Redox Cleavable Linking Groups

[0547] In certain embodiments, a cleavable linking group is a redox cleavable linking group that is cleaved upon reduction or oxidation. An example of reductively cleavable linking group is a disulphide linking group (—S—S—). To determine if a candidate cleavable linking group is a suitable “reductively cleavable linking group,” or for example is suitable for use with a particular iRNA moiety and particular targeting agent one can look to methods described herein. For example, a candidate can be evaluated by incubation with dithiothreitol (DTT), or other reducing agent using reagents know in the art, which mimic the rate of cleavage which would be observed in a cell, e.g., a target cell. The candidates can also be evaluated under conditions which are selected to mimic blood or serum conditions. In one, candidate compounds are cleaved by at most about 10% in the blood. In other embodiments, useful candidate compounds are degraded at least about 2, 4, 10, 20, 30, 40, 50, 60, 70, 80, 90, or about 100 times faster in the cell (or under in vitro conditions selected to mimic intracellular conditions) as compared to blood (or under in vitro conditions selected to mimic extracellular conditions). The rate of cleavage of candidate compounds can be determined using standard enzyme kinetics assays under conditions chosen to mimic intracellular media and compared to conditions chosen to mimic extracellular media.

[0548] ii. Phosphate-Based Cleavable Linking Groups

[0549] In certain embodiments, a cleavable linker comprises a phosphate-based cleavable linking group. A phosphate-based cleavable linking group is cleaved by agents that degrade or hydrolyze the phosphate group. An example of an agent that cleaves phosphate groups in cells are enzymes such as phosphatases in cells. Examples of phosphate-based linking groups are —O—P(O)(ORk)-O—, —O—P(S)(ORk)-O—, —O—P(S)(SRk)-O—, —S—P(O)(ORk)-O—, —O—P(O)(ORk)-S—, —S—P(O)(ORk)-S—, —O—P(S)(ORk)-S—, —S—P(S)(ORk)-O—, —O—P(O)(Rk)-O—, —O—P(S)(Rk)-O—, —S—P(O)(Rk)-O—, —S—P(S)(Rk)-O—, —S—P(O)(Rk)-S—, —O—P(S)(Rk)-S. Preferred embodiments are —O—P(O)(OH)—O—, —O—P(S)(OH)—O—, —O—P(S)(SH)—O—, —S—P(O)(OH)—O—, —O—P(O)(OH)—S—, —S—P(O)(OH)—S—, —O—P(S)(OH)—S—, —S—P(S)(OH)—O—, —O—P(O)(H)—O—, —O—P(S)(H)—O—, —S—P(O)(H)—O, —S—P(S)(H)—O—, —S—P(O)(H)—S—, —O—P(S)(H)—S—. A preferred embodiment is —O—P(O)(OH)—O—. These candidates can be evaluated using methods analogous to those described above.

[0550] iii. Acid Cleavable Linking Groups

[0551] In certain embodiments, a cleavable linker comprises an acid cleavable linking group. An acid cleavable linking group is a linking group that is cleaved under acidic conditions. In preferred embodiments acid cleavable linking groups are cleaved in an acidic environment with a pH of about 6.5 or lower (e.g., about 6.0, 5.75, 5.5, 5.25, 5.0, or lower), or by agents such as enzymes that can act as a general acid. In a cell, specific low pH organelles, such as endosomes and lysosomes can provide a cleaving environment for acid cleavable linking groups. Examples of acid cleavable linking groups include but are not limited to hydrazones, esters, and esters of amino acids. Acid cleavable groups can have the general formula —C═NN—, C(O)O, or —OC(O). A preferred embodiment is when the carbon attached to the oxygen of the ester (the alkoxy group) is an aryl group, substituted alkyl group, or tertiary alkyl group such as dimethyl pentyl or t-butyl. These candidates can be evaluated using methods analogous to those described above.

[0552] iv. Ester-Based Cleavable Linking Groups

[0553] In certain embodiments, a cleavable linker comprises an ester-based cleavable linking group. An ester-based cleavable linking group is cleaved by enzymes such as esterases and amidases in cells. Examples of ester-based cleavable linking groups include but are not limited to esters of alkylene, alkenylene and alkynylene groups. Ester cleavable linking groups have the general formula —C(O)O—, or —OC(O)—. These candidates can be evaluated using methods analogous to those described above.

[0554] v. Peptide-Based Cleavable Linking Groups

[0555] In yet another embodiment, a cleavable linker comprises a peptide-based cleavable linking group. A peptide-based cleavable linking group is cleaved by enzymes such as peptidases and proteases in cells. Peptide-based cleavable linking groups are peptide bonds formed between amino acids to yield oligopeptides (e.g., dipeptides, tripeptides etc.) and polypeptides. Peptide-based cleavable groups do not include the amide group (—C(O)NH—). The amide group can be formed between any alkylene, alkenylene or alkynylene. A peptide bond is a special type of amide bond formed between amino acids to yield peptides and proteins. The peptide based cleavage group is generally limited to the peptide bond (i.e., the amide bond) formed between amino acids yielding peptides and proteins and does not include the entire amide functional group. Peptide-based cleavable linking groups have the general formula —NHCHRAC(O)NHCHRBC(O)—, where RA and RB are the R groups of the two adjacent amino acids. These candidates can be evaluated using methods analogous to those described above.

[0556] In some embodiments, an iRNA of the invention is conjugated to a carbohydrate through a linker. Non-limiting examples of iRNA carbohydrate conjugates with linkers of the compositions and methods of the invention include, but are not limited to,

[chemical structure]

[chemical structure]

when one of X or Y is an oligonucleotide, the other is a hydrogen.

[0557] In certain embodiments of the compositions and methods of the invention, a ligand is one or more “GalNAc” (N-acetylgalactosamine) derivatives attached through a bivalent or trivalent branched linker.

[0558] In certain embodiments, a dsRNA of the invention is conjugated to a bivalent or trivalent branched linker selected from the group of structures shown in any of formula (XLV)-(XLVI):

[chemical structure]

[0559] wherein:

[0560] q2A, q2B, q3A, q3B, q4A, q4B, q5A, q5B and q5C represent independently for each occurrence 0-20 and wherein the repeating unit can be the same or different;

[0561] P^{2A}, P^{2B}, P^{3A}, P^{3B}, P^{4A}, P^{4B}, P^{5A}, P^{5B}, P^{5C}, T^{2A}, T^{2B}, T^{3A}, T^{3B}, T^{4A}, T^{4B}, T^{4A}, T^{5B}, T^{5C} are each independently for each occurrence absent, CO, NH, O, S, OC(O), NHC(O), CH₂, CH₂NH or CH₂O;

[0562] Q^{2A}, Q^{2B}, Q^{3A}, Q^{3B}, Q^{4A}, Q^{4B}, Q^{5A}, Q^{5B}, Q^{5C}, are independently for each occurrence absent, alkylene, substituted alkylene wherein one or more methylenes can be interrupted or terminated by one or more of O, S, S(O), SO₂, N(R^{N}), C(R′)═C(R″), C≡C or C(O);

[0563] R^{2A}, R^{2B}, R^{3A}, R^{3B}, R^{4A}, R^{4B}, R^{5A}, R^{5B}, R^{5C} are each independently for each occurrence absent, NH, O, S, CH₂, C(O)O, C(O)NH, NHCH(R^{a})C(O), —C(O)—CH(R^{a})—NH—, CO, CH═N—O,

[chemical structure]

or heterocyclyl; L^{2A}, L^{2B}, L^{3A}, L^{3B}, L^{4A}, L^{4B}, L^{5A}, L^{5B} and L^{5C} represent the ligand; i.e. each independently for each occurrence a monosaccharide (such as GalNAc), disaccharide, trisaccharide, tetrasaccharide, oligosaccharide, or polysaccharide; and R^{a} is H or amino acid side chain. Trivalent conjugating GalNAc derivatives are particularly useful for use with RNAi agents for inhibiting the expression of a target gene, such as those of formula (XLIX):

[chemical structure]

[0564] wherein L^{5A}, L^{5B} and L^{5C} represent a monosaccharide, such as GalNAc derivative.

[0565] Examples of suitable bivalent and trivalent branched linker groups conjugating GalNAc derivatives include, but are not limited to, the structures recited above as formulas II, VII, XI, X, and XIII.

[0566] Representative U.S. Patents that teach the preparation of RNA conjugates include, but are not limited to, U.S. Pat. Nos. 4,828,979; 4,948,882; 5,218,105; 5,525,465; 5,541,313; 5,545,730; 5,552,538; 5,578,717, 5,580,731; 5,591,584; 5,109,124; 5,118,802; 5,138,045; 5,414,077; 5,486,603; 5,512,439; 5,578,718; 5,608,046; 4,587,044; 4,605,735; 4,667,025; 4,762,779; 4,789,737; 4,824,941; 4,835,263; 4,876,335; 4,904,582; 4,958,013; 5,082,830; 5,112,963; 5,214,136; 5,082,830; 5,112,963; 5,214,136; 5,245,022; 5,254,469; 5,258,506; 5,262,536; 5,272,250; 5,292,873; 5,317,098; 5,371,241, 5,391,723; 5,416,203, 5,451,463; 5,510,475; 5,512,667; 5,514,785; 5,565,552; 5,567,810; 5,574,142; 5,585,481; 5,587,371; 5,595,726; 5,597,696; 5,599,923; 5,599,928; 5,688,941; 6,294,664; 6,320,017; 6,576,752; 6,783,931; 6,900,297; 7,037,646; and 8,106,022, the entire contents of each of which are hereby incorporated herein by reference.

[0567] It is not necessary for all positions in a given compound to be uniformly modified, and in fact more than one of the aforementioned modifications can be incorporated in a single compound or even at a single nucleoside within an iRNA. The present invention also includes iRNA compounds that are chimeric compounds.

[0568] “Chimeric” iRNA compounds or “chimeras,” in the context of this invention, are iRNA compounds, preferably dsRNA agents, that contain two or more chemically distinct regions, each made up of at least one monomer unit, i.e., a nucleotide in the case of a dsRNA compound. These iRNAs typically contain at least one region wherein the RNA is modified so as to confer upon the iRNA increased resistance to nuclease degradation, increased cellular uptake, or increased binding affinity for the target nucleic acid. An additional region of the iRNA can serve as a substrate for enzymes capable of cleaving RNA:DNA or RNA:RNA hybrids. By way of example, RNase H is a cellular endonuclease which cleaves the RNA strand of an RNA:DNA duplex. Activation of RNase H, therefore, results in cleavage of the RNA target, thereby greatly enhancing the efficiency of iRNA inhibition of gene expression. Consequently, comparable results can often be obtained with shorter iRNAs when chimeric dsRNAs are used, compared to phosphorothioate deoxy dsRNAs hybridizing to the same target region. Cleavage of the RNA target can be routinely detected by gel electrophoresis and, if necessary, associated nucleic acid hybridization techniques known in the art.

[0569] In certain instances, the RNA of an iRNA can be modified by a non-ligand group. A number of non-ligand molecules have been conjugated to iRNAs in order to enhance the activity, cellular distribution or cellular uptake of the iRNA, and procedures for performing such conjugations are available in the scientific literature. Such non-ligand moieties have included lipid moieties, such as cholesterol (Kubo, T. et al., Biochem. Biophys. Res. Comm., 2007, 365(1):54-61; Letsinger et al., Proc. Natl. Acad. Sci. USA, 1989, 86:6553), cholic acid (Manoharan et al., Bioorg. Med. Chem. Lett., 1994, 4:1053), a thioether, e.g., hexyl-S-tritylthiol (Manoharan et al., Ann. N.Y. Acad. Sci., 1992, 660:306; Manoharan et al., Bioorg. Med. Chem. Let., 1993, 3:2765), a thiocholesterol (Oberhauser et al., Nucl. Acids Res., 1992, 20:533), an aliphatic chain, e.g., dodecandiol or undecyl residues (Saison-Behmoaras et al., EMBO J., 1991, 10:111; Kabanov et al., FEBS Lett., 1990, 259:327; Svinarchuk et al., Biochimie, 1993, 75:49), a phospholipid, e.g., di-hexadecyl-rac-glycerol or triethylammonium 1,2-di-O-hexadecyl-rac-glycero-3-H-phosphonate (Manoharan et al., Tetrahedron Lett., 1995, 36:3651; Shea et al., Nucl. Acids Res., 1990, 18:3777), a polyamine or a polyethylene glycol chain (Manoharan et al., Nucleosides & Nucleotides, 1995, 14:969), or adamantane acetic acid (Manoharan et al., Tetrahedron Lett., 1995, 36:3651), a palmityl moiety (Mishra et al., Biochim. Biophys. Acta, 1995, 1264:229), or an octadecylamine or hexylamino-carbonyl-oxycholesterol moiety (Crooke et al., J. Pharmacol. Exp. Ther., 1996, 277:923). Representative United States patents that teach the preparation of such RNA conjugates have been listed above. Typical conjugation protocols involve the synthesis of RNAs bearing an aminolinker at one or more positions of the sequence. The amino group is then reacted with the molecule being conjugated using appropriate coupling or activating reagents. The conjugation reaction can be performed either with the RNA still bound to the solid support or following cleavage of the RNA, in solution phase. Purification of the RNA conjugate by HPLC typically affords the pure conjugate.

### V. In Vivo Testing of RPS25 Knockdown

[0570] A number of RPS25 mouse models are known in the art and reviewed in, for example, Batra and Lee (2017) Front Cell Neurosci. 11: 196. Such models can be used to demonstrate the in vivo efficacy of the RNAi agents provided herein. Some exemplary models are provided below.

[0571] A mouse model carrying an AAV2/9 vector expressing a C9orf72 G4C2-repeat DNA (hexanucleotide repeat expansion (GGGGCC (G4C2) (HRE)) with a 119 base-pair (bp) of the upstream 5′ region and 100 bp of the downstream 3′ region of the human C9orf72 (Chew J., et al. (2015). Science 348 1151-1154).

[0572] Another example is a transgenic mouse model carrying a bacterial artificial chromosome (BAC) DNA clone containing a partial human C9orf72 gene region, including exons 1 to 6, a (G4C2) 500 region (SEQ ID NO: 22) and a 141 Kb 5′ upstream region (Peters O. M., et al. (2015). Neuron 88 902-909).

[0573] A mouse model carrying a BAC clone containing the human C9orf72 locus, including all 11 exons, a (G4C2) 800 region (SEQ ID NO: 2519), 110 Kb 5′ upstream and 20 Kb 3′ downstream flanking regions of the C9orf72 gene (O'Rourke J. G., et al. (2015). Neuron 88 892-901).

### VI. Delivery of a RNAi Agent of the Disclosure

[0574] The delivery of a RNAi agent of the disclosure to a cell e.g., a cell within a subject, such as a human subject (e.g., a subject in need thereof, such as a subject having an RPS25-associated disorder, e.g., a nucleotide repeat expansion diseases, such as C9orf72 ALS/FTD, Huntington-Like Syndrome Due To C9orf72 Expansions, Fragile X syndrome (FXS), Myotonic dystrophy (i.e., DM1, and DM2), CAG/polyglutamine disease (e.g., Huntington's disease, Spinal and bulbar muscular atrophy (SBMA), Dentatorubral-pallidoluysian atrophy, Spinocerebellar ataxia type I, Spinocerebellar ataxia type 2, Spinocerebellar ataxia type 3, Spinocerebellar ataxia type 6, Spinocerebellar ataxia type 7, Spinocerebellar ataxia type 8, Spinocerebellar ataxia type 12, and Spinocerebellar ataxia type 17), Friedreich ataxia, Unverricht-Lundborg myoclonic epilepsy (EPM1), Oculopharyngeal muscular dystrophy (OPMD), and Fuchs endothelial corneal dystrophy (FECD)) can be achieved in a number of different ways. For example, delivery may be performed by contacting a cell with a RNAi agent of the disclosure either in vitro or in vivo. In vivo delivery may also be performed directly by administering a composition comprising a RNAi agent, e.g., a dsRNA, to a subject. Alternatively, in vivo delivery may be performed indirectly by administering one or more vectors that encode and direct the expression of the RNAi agent. These alternatives are discussed further below.

[0575] In general, any method of delivering a nucleic acid molecule (in vitro or in vivo) can be adapted for use with a RNAi agent of the disclosure (see e.g., Akhtar S. and Julian R L., (1992) Trends Cell. Biol. 2(5):139-144 and WO94/02595, which are incorporated herein by reference in their entireties). For in vivo delivery, factors to consider in order to deliver a RNAi agent include, for example, biological stability of the delivered agent, prevention of non-specific effects, and accumulation of the delivered agent in the target tissue. The non-specific effects of a RNAi agent can be minimized by local administration, for example, by direct injection or implantation into a tissue or topically administering the preparation. Local administration to a treatment site maximizes local concentration of the agent, limits the exposure of the agent to systemic tissues that can otherwise be harmed by the agent or that can degrade the agent, and permits a lower total dose of the RNAi agent to be administered. Several studies have shown successful knockdown of gene products when a RNAi agent is administered locally. For example, intraocular delivery of a VEGF dsRNA by intravitreal injection in cynomolgus monkeys (Tolentino, M J. et al., (2004) Retina 24:132-138) and subretinal injections in mice (Reich, S J. et al. (2003) Mol. Vis. 9:210-216) were both shown to prevent neovascularization in an experimental model of age-related macular degeneration. In addition, direct intratumoral injection of a dsRNA in mice reduces tumor volume (Pille, J. et al. (2005) Mol. Ther. 11:267-274) and can prolong survival of tumor-bearing mice (Kim, W J. et al., (2006) Mol. Ther. 14:343-350; Li, S. et al., (2007) Mol. Ther. 15:515-523). RNA interference has also shown success with local delivery to the CNS by direct injection (Dorn, G. et al., (2004) Nucleic Acids 32:e49; Tan, P H. et al. (2005) Gene Ther. 12:59-66; Makimura, H. et al. (2002) BMC Neurosci. 3:18; Shishkina, G T., et al. (2004) Neuroscience 129:521-528; Thakker, E R., et al. (2004) Proc. Natl. Acad. Sci. U.S.A. 101:17270-17275; Akaneya, Y., et al. (2005) J. Neurophysiol. 93:594-602) and to the lungs by intranasal administration (Howard, K A. et al., (2006) Mol. Ther. 14:476-484; Zhang, X. et al., (2004) J. Biol. Chem. 279:10677-10684; Bitko, V. et al., (2005) Nat. Med. 11:50-55). For administering a RNAi agent systemically for the treatment of a disease, the RNA can be modified or alternatively delivered using a drug delivery system; both methods act to prevent the rapid degradation of the dsRNA by endo- and exo-nucleases in vivo. Modification of the RNA or the pharmaceutical carrier can also permit targeting of the RNAi agent to the target tissue and avoid undesirable off-target effects (e.g., without wishing to be bound by theory, use of GNAs as described herein has been identified to destabilize the seed region of a dsRNA, resulting in enhanced preference of such dsRNAs for on-target effectiveness, relative to off-target effects, as such off-target effects are significantly weakened by such seed region destabilization). RNAi agents can be modified by chemical conjugation to lipophilic groups such as cholesterol to enhance cellular uptake and prevent degradation. For example, a RNAi agent directed against ApoB conjugated to a lipophilic cholesterol moiety was injected systemically into mice and resulted in knockdown of apoB mRNA in both the liver and jejunum (Soutschek, J. et al., (2004) Nature 432:173-178). Conjugation of an RNAi agent to an aptamer has been shown to inhibit tumor growth and mediate tumor regression in a mouse model of prostate cancer (McNamara, J O. et al., (2006) Nat. Biotechnol. 24:1005-1015). In an alternative embodiment, the RNAi agent can be delivered using drug delivery systems such as a nanoparticle, a dendrimer, a polymer, liposomes, or a cationic delivery system. Positively charged cationic delivery systems facilitate binding of molecule RNAi agent (negatively charged) and also enhance interactions at the negatively charged cell membrane to permit efficient uptake of an RNAi agent by the cell. Cationic lipids, dendrimers, or polymers can either be bound to an RNAi agent, or induced to form a vesicle or micelle (see e.g., Kim S H. et al., (2008) Journal of Controlled Release 129(2):107-116) that encases a RNAi agent. The formation of vesicles or micelles further prevents degradation of the RNAi agent when administered systemically. Methods for making and administering cationic-RNAi agent complexes are well within the abilities of one skilled in the art (see e.g., Sorensen, D R., et al. (2003) J. Mol. Biol 327:761-766; Verma, U N. et al., (2003) Clin. Cancer Res. 9:1291-1300; Arnold, A S et al. (2007) J. Hypertens. 25:197-205, which are incorporated herein by reference in their entirety). Some non-limiting examples of drug delivery systems useful for systemic delivery of RNAi agents include DOTAP (Sorensen, D R., et al (2003), supra; Verma, U N. et al., (2003), supra), Oligofectamine, “solid nucleic acid lipid particles” (Zimmermann, T S. et al., (2006) Nature 441:111-114), cardiolipin (Chien, P Y. et al., (2005) Cancer Gene Ther. 12:321-328; Pal, A. et al., (2005) Int J. Oncol. 26:1087-1091), polyethyleneimine (Bonnet M E. et al., (2008) Pharm. Res. August 16 Epub ahead of print; Aigner, A. (2006) J. Biomed. Biotechnol. 71659), Arg-Gly-Asp (RGD) peptides (Liu, S. (2006) Mol. Pharm. 3:472-487), and polyamidoamines (Tomalia, D A. et al., (2007) Biochem. Soc. Trans. 35:61-67; Yoo, H. et al., (1999) Pharm. Res. 16:1799-1804). In some embodiments, a RNAi agent forms a complex with cyclodextrin for systemic administration. Methods for administration and pharmaceutical compositions of RNAi agents and cyclodextrins can be found in U.S. Pat. No. 7,427, 605, which is herein incorporated by reference in its entirety.

[0576] Certain aspects of the instant disclosure relate to a method of reducing the expression of an RPS25 target gene in a cell, comprising contacting said cell with the double-stranded RNAi agent of the disclosure. In one embodiment, the cell is an extrahepatic cell, optionally a CNS cell.

[0577] Another aspect of the disclosure relates to a method of reducing the expression of an RPS25 target gene in a subject, comprising administering to the subject the double-stranded RNAi agent of the disclosure.

[0578] Another aspect of the disclosure relates to a method of treating a subject having a CNS disorder, comprising administering to the subject a therapeutically effective amount of the double-stranded RPS25-targeting RNAi agent of the disclosure, thereby treating the subject. Exemplary CNS disorders that can be treated by the method of the disclosure include nucleotide repeat expansion diseases, such as C9orf72 ALS/FTD, Huntington-Like Syndrome Due To C9orf72 Expansions, Fragile X syndrome (FXS), Myotonic dystrophy (i.e., DM1, and DM2), CAG/polyglutamine disease (e.g., Huntington's disease, Spinal and bulbar muscular atrophy (SBMA), Dentatorubral-pallidoluysian atrophy, Spinocerebellar ataxia type I, Spinocerebellar ataxia type 2, Spinocerebellar ataxia type 3, Spinocerebellar ataxia type 6, Spinocerebellar ataxia type 7, Spinocerebellar ataxia type 8, Spinocerebellar ataxia type 12, and Spinocerebellar ataxia type 17), Friedreich ataxia, Unverricht-Lundborg myoclonic epilepsy (EPM1), Oculopharyngeal muscular dystrophy (OPMD), and Fuchs endothelial corneal dystrophy (FECD).

[0579] In one embodiment, the double-stranded RNAi agent is administered intrathecally. By intrathecal administration of the double-stranded RNAi agent, the method can reduce the expression of an RPS25 target gene in a brain (e.g., striatum) or spine tissue, for instance, cortex, cerebellum, cervical spine, lumbar spine, and thoracic spine.

[0580] For ease of exposition the formulations, compositions and methods in this section are discussed largely with regard to modified siRNA compounds. It may be understood, however, that these formulations, compositions and methods can be practiced with other siRNA compounds, e.g., unmodified siRNA compounds, and such practice is within the disclosure. A composition that includes a RNAi agent can be delivered to a subject by a variety of routes. Exemplary routes include: intrathecal, intravenous, topical, rectal, anal, vaginal, nasal, pulmonary, and ocular.

[0581] The RNAi agents of the disclosure can be incorporated into pharmaceutical compositions suitable for administration. Such compositions typically include one or more species of RNAi agent and a pharmaceutically acceptable carrier. As used herein the language “pharmaceutically acceptable carrier” is intended to include any and all solvents, dispersion media, coatings, antibacterial and antifungal agents, isotonic and absorption delaying agents, and the like, compatible with pharmaceutical administration. The use of such media and agents for pharmaceutically active substances is well known in the art. Except insofar as any conventional media or agent is incompatible with the active compound, use thereof in the compositions is contemplated. Supplementary active compounds can also be incorporated into the compositions.

[0582] The pharmaceutical compositions of the present disclosure may be administered in a number of ways depending upon whether local or systemic treatment is desired and upon the area to be treated. Administration may be topical (including ophthalmic, vaginal, rectal, intranasal, transdermal), oral, or parenteral. Parenteral administration includes intravenous drip, subcutaneous, intraperitoneal or intramuscular injection, or intrathecal or intraventricular administration.

[0583] The route and site of administration may be chosen to enhance targeting. For example, to target muscle cells, intramuscular injection into the muscles of interest would be a logical choice. Lung cells might be targeted by administering the RNAi agent in aerosol form. The vascular endothelial cells could be targeted by coating a balloon catheter with the RNAi agent and mechanically introducing the RNA.

[0584] Formulations for topical administration may include transdermal patches, ointments, lotions, creams, gels, drops, suppositories, sprays, liquids, and powders. Conventional pharmaceutical carriers, aqueous, powder or oily bases, thickeners and the like may be necessary or desirable. Coated condoms, gloves and the like may also be useful.

[0585] Compositions for oral administration include powders or granules, suspensions or solutions in water, syrups, elixirs or non-aqueous media, tablets, capsules, lozenges, or troches. In the case of tablets, carriers that can be used include lactose, sodium citrate and salts of phosphoric acid. Various disintegrants such as starch, and lubricating agents such as magnesium stearate, sodium lauryl sulfate and talc, are commonly used in tablets. For oral administration in capsule form, useful diluents are lactose and high molecular weight polyethylene glycols. When aqueous suspensions are required for oral use, the nucleic acid compositions can be combined with emulsifying and suspending agents. If desired, certain sweetening or flavoring agents can be added.

[0586] Compositions for intrathecal or intraventricular administration may include sterile aqueous solutions which may also contain buffers, diluents, and other suitable additives.

[0587] Formulations for parenteral administration may include sterile aqueous solutions which may also contain buffers, diluents, and other suitable additives. Intraventricular injection may be facilitated by an intraventricular catheter, for example, attached to a reservoir. For intravenous use, the total concentration of solutes may be controlled to render the preparation isotonic.

[0588] In one embodiment, the administration of the siRNA compound, e.g., a double-stranded siRNA compound, or ssiRNA compound, composition is parenteral, e.g., intravenous (e.g., as a bolus or as a diffusible infusion), intradermal, intraperitoneal, intramuscular, intrathecal, intraventricular, intracranial, subcutaneous, transmucosal, buccal, sublingual, endoscopic, rectal, oral, vaginal, topical, pulmonary, intranasal, urethral, or ocular. Administration can be provided by the subject or by another person, e.g., a health care provider. The medication can be provided in measured doses or in a dispenser which delivers a metered dose. Selected modes of delivery are discussed in more detail below.

[0589] Intrathecal Administration.

[0590] In one embodiment, the double-stranded RNAi agent is delivered by intrathecal injection (i.e., injection into the spinal fluid which bathes the brain and spinal cord tissue). Intrathecal injection of RNAi agents into the spinal fluid can be performed as a bolus injection or via minipumps which can be implanted beneath the skin, providing a regular and constant delivery of siRNA into the spinal fluid. The circulation of the spinal fluid from the choroid plexus, where it is produced, down around the spinal chord and dorsal root ganglia and subsequently up past the cerebellum and over the cortex to the arachnoid granulations, where the fluid can exit the CNS, that, depending upon size, stability, and solubility of the compounds injected, molecules delivered intrathecally could hit targets throughout the entire CNS.

[0591] In some embodiments, the intrathecal administration is via a pump. The pump may be a surgically implanted osmotic pump. In one embodiment, the osmotic pump is implanted into the subarachnoid space of the spinal canal to facilitate intrathecal administration.

[0592] In some embodiments, the intrathecal administration is via an intrathecal delivery system for a pharmaceutical including a reservoir containing a volume of the pharmaceutical agent, and a pump configured to deliver a portion of the pharmaceutical agent contained in the reservoir. More details about this intrathecal delivery system may be found in WO 2015/116658, which is incorporated by reference in its entirety.

[0593] The amount of intrathecally injected RNAi agents may vary from one target gene to another target gene and the appropriate amount that has to be applied may have to be determined individually for each target gene. Typically, this amount ranges from 10 μg to 2 mg, preferably 50 μg to 1500 μg, more preferably 100 μg to 1000 μg.

[0594] Vector Encoded RNAi Agents of the Disclosure

[0595] RNAi agents targeting the RPS25 gene can be expressed from transcription units inserted into DNA or RNA vectors (see, e.g., Couture, A, et al., TIG. (1996), 12:5-10; WO 00/22113, WO 00/22114, and U.S. Pat. No. 6,054,299). Expression is preferably sustained (months or longer), depending upon the specific construct used and the target tissue or cell type. These transgenes can be introduced as a linear construct, a circular plasmid, or a viral vector, which can be an integrating or non-integrating vector. The transgene can also be constructed to permit it to be inherited as an extrachromosomal plasmid (Gassmann, et al., (1995) Proc. Natl. Acad. Sci. USA 92:1292).

[0596] The individual strand or strands of a RNAi agent can be transcribed from a promoter on an expression vector. Where two separate strands are to be expressed to generate, for example, a dsRNA, two separate expression vectors can be co-introduced (e.g., by transfection or infection) into a target cell. Alternatively, each individual strand of a dsRNA can be transcribed by promoters both of which are located on the same expression plasmid. In one embodiment, a dsRNA is expressed as inverted repeat polynucleotides joined by a linker polynucleotide sequence such that the dsRNA has a stem and loop structure.

[0597] RNAi agent expression vectors are generally DNA plasmids or viral vectors. Expression vectors compatible with eukaryotic cells, preferably those compatible with vertebrate cells, can be used to produce recombinant constructs for the expression of a RNAi agent as described herein. Delivery of RNAi agent expressing vectors can be systemic, such as by intravenous or intramuscular administration, by administration to target cells ex-planted from the patient followed by reintroduction into the patient, or by any other means that allows for introduction into a desired target cell.

[0598] Viral vector systems which can be utilized with the methods and compositions described herein include, but are not limited to, (a) adenovirus vectors; (b) retrovirus vectors, including but not limited to lentiviral vectors, moloney murine leukemia virus, etc.; (c) adeno-associated virus vectors; (d) herpes simplex virus vectors; (e) SV 40 vectors; (f) polyoma virus vectors; (g) papilloma virus vectors; (h) picornavirus vectors; (i) pox virus vectors such as an orthopox, e.g., vaccinia virus vectors or avipox, e.g. canary pox or fowl pox; and (j) a helper-dependent or gutless adenovirus. Replication-defective viruses can also be advantageous. Different vectors will or will not become incorporated into the cells' genome. The constructs can include viral sequences for transfection, if desired. Alternatively, the construct can be incorporated into vectors capable of episomal replication, e.g. EPV and EBV vectors. Constructs for the recombinant expression of a RNAi agent will generally require regulatory elements, e.g., promoters, enhancers, etc., to ensure the expression of the RNAi agent in target cells. Other aspects to consider for vectors and constructs are known in the art.

### VII. Pharmaceutical Compositions of the Invention

[0599] The present disclosure also includes pharmaceutical compositions and formulations which include the RNAi agents of the disclosure. In one embodiment, provided herein are pharmaceutical compositions containing an RNAi agent, as described herein, and a pharmaceutically acceptable carrier. The pharmaceutical compositions containing the RNAi agent are useful for treating a disease or disorder associated with the expression or activity of RPS25, e.g., nucleotide repeat expansion diseases, such as C9orf72 ALS/FTD, Huntington-Like Syndrome Due To C9orf72 Expansions, Fragile X syndrome (FXS), Myotonic dystrophy (i.e., DM1, and DM2), CAG/polyglutamine disease (e.g., Huntington's disease, Spinal and bulbar muscular atrophy (SBMA), Dentatorubral-pallidoluysian atrophy, Spinocerebellar ataxia type I, Spinocerebellar ataxia type 2, Spinocerebellar ataxia type 3, Spinocerebellar ataxia type 6, Spinocerebellar ataxia type 7, Spinocerebellar ataxia type 8, Spinocerebellar ataxia type 12, and Spinocerebellar ataxia type 17), Friedreich ataxia, Unverricht-Lundborg myoclonic epilepsy (EPM1), Oculopharyngeal muscular dystrophy (OPMD), and Fuchs endothelial corneal dystrophy (FECD).

[0600] Such pharmaceutical compositions are formulated based on the mode of delivery. One example is compositions that are formulated for systemic administration via parenteral delivery, e.g., by intravenous (IV), intramuscular (IM), or for subcutaneous (subQ) delivery. Another example is compositions that are formulated for direct delivery into the CNS, e.g., by intrathecal or intravitreal routes of injection, optionally by infusion into the brain (e.g., striatum), such as by continuous pump infusion.

[0601] In some embodiments, the pharmaceutical compositions of the invention are pyrogen free or non-pyrogenic.

[0602] The pharmaceutical compositions of the disclosure may be administered in dosages sufficient to inhibit expression of an RPS25 gene. In general, a suitable dose of an RNAi agent of the disclosure will be in the range of about 0.001 to about 200.0 milligrams per kilogram body weight of the recipient per day, generally in the range of about 1 to 50 mg per kilogram body weight per day.

[0603] A repeat-dose regimen may include administration of a therapeutic amount of a RNAi agent on a regular basis, such as monthly to once every six months. In certain embodiments, the RNAi agent is administered about once per quarter (i.e., about once every three months) to about twice per year.

[0604] After an initial treatment regimen (e.g., loading dose), the treatments can be administered on a less frequent basis.

[0605] In other embodiments, a single dose of the pharmaceutical compositions can be long lasting, such that subsequent doses are administered at not more than 1, 2, 3, or 4 or more month intervals. In some embodiments of the disclosure, a single dose of the pharmaceutical compositions of the disclosure is administered once per month. In other embodiments of the disclosure, a single dose of the pharmaceutical compositions of the disclosure is administered once per quarter to twice per year.

[0606] The skilled artisan will appreciate that certain factors can influence the dosage and timing required to effectively treat a subject, including but not limited to the severity of the disease or disorder, previous treatments, the general health or age of the subject, and other diseases present. Moreover, treatment of a subject with a therapeutically effective amount of a composition can include a single treatment or a series of treatments.

[0607] Advances in mouse genetics have generated a number of mouse models for the study of various human diseases, such as C9orf72 ALS/FTD that would benefit from reduction in the expression of RPS25. Such models can be used for in vivo testing of RNAi agents, as well as for determining a therapeutically effective dose. Suitable mouse models are known in the art and include, for example, the mouse models described elsewhere herein.

[0608] The pharmaceutical compositions of the present disclosure can be administered in a number of ways depending upon whether local or systemic treatment is desired and upon the area to be treated. Administration can be topical (e.g., by a transdermal patch), pulmonary, e.g., by inhalation or insufflation of powders or aerosols, including by nebulizer; intratracheal, intranasal, epidermal and transdermal, oral or parenteral. Parenteral administration includes intravenous, intraarterial, subcutaneous, intraperitoneal or intramuscular injection or infusion; subdermal, e.g., via an implanted device; or intracranial, e.g., by intraparenchymal, intrathecal or intraventricular, administration.

[0609] The RNAi agents can be delivered in a manner to target a particular tissue, such as the CNS (e.g., neuronal, glial or vascular tissue of the brain).

[0610] Pharmaceutical compositions and formulations for topical administration can include transdermal patches, ointments, lotions, creams, gels, drops, suppositories, sprays, liquids and powders. Conventional pharmaceutical carriers, aqueous, powder or oily bases, thickeners and the like can be necessary or desirable. Coated condoms, gloves and the like can also be useful. Suitable topical formulations include those in which the RNAi agents featured in the disclosure are in admixture with a topical delivery agent such as lipids, liposomes, fatty acids, fatty acid esters, steroids, chelating agents and surfactants. Suitable lipids and liposomes include neutral (e.g., dioleoylphosphatidyl DOPE ethanolamine, dimyristoylphosphatidyl choline DMPC, distearolyphosphatidyl choline) negative (e.g., dimyristoylphosphatidyl glycerol DMPG) and cationic (e.g., dioleoyltetramethylaminopropyl DOTAP and dioleoylphosphatidyl ethanolamine DOTMA). RNAi agents featured in the disclosure can be encapsulated within liposomes or can form complexes thereto, in particular to cationic liposomes. Alternatively, RNAi agents can be complexed to lipids, in particular to cationic lipids. Suitable fatty acids and esters include but are not limited to arachidonic acid, oleic acid, eicosanoic acid, lauric acid, caprylic acid, capric acid, myristic acid, palmitic acid, stearic acid, linoleic acid, linolenic acid, dicaprate, tricaprate, monoolein, dilaurin, glyceryl 1-monocaprate, 1-dodecylazacycloheptan-2-one, an acylcarnitine, an acylcholine, or a C₁₋₂₀ alkyl ester (e.g., isopropylmyristate IPM), monoglyceride, diglyceride or pharmaceutically acceptable salt thereof. Topical formulations are described in detail in U.S. Pat. No. 6,747,014, which is incorporated herein by reference.

[0611] A. RNAi Agent Formulations Comprising Membranous Molecular Assemblies

[0612] A RNAi agent for use in the compositions and methods of the disclosure can be formulated for delivery in a membranous molecular assembly, e.g., a liposome or a micelle. As used herein, the term “liposome” refers to a vesicle composed of amphiphilic lipids arranged in at least one bilayer, e.g., one bilayer or a plurality of bilayers. Liposomes include unilamellar and multilamellar vesicles that have a membrane formed from a lipophilic material and an aqueous interior. The aqueous portion contains the RNAi agent composition. The lipophilic material isolates the aqueous interior from an aqueous exterior, which typically does not include the RNAi agent composition, although in some examples, it may. Liposomes are useful for the transfer and delivery of active ingredients to the site of action. Because the liposomal membrane is structurally similar to biological membranes, when liposomes are applied to a tissue, the liposomal bilayer fuses with bilayer of the cellular membranes. As the merging of the liposome and cell progresses, the internal aqueous contents that include the RNAi agent are delivered into the cell where the RNAi agent can specifically bind to a target RNA and can mediate RNAi. In some cases the liposomes are also specifically targeted, e.g., to direct the RNAi agent to particular cell types.

[0613] A liposome containing an RNAi agent can be prepared by a variety of methods. In one example, the lipid component of a liposome is dissolved in a detergent so that micelles are formed with the lipid component. For example, the lipid component can be an amphipathic cationic lipid or lipid conjugate. The detergent can have a high critical micelle concentration and may be nonionic.

[0614] Exemplary detergents include cholate, CHAPS, octylglucoside, deoxycholate, and lauroyl sarcosine. The RNAi agent preparation is then added to the micelles that include the lipid component. The cationic groups on the lipid interact with the RNAi agent and condense around the RNAi agent to form a liposome. After condensation, the detergent is removed, e.g., by dialysis, to yield a liposomal preparation of RNAi agent.

[0615] If necessary a carrier compound that assists in condensation can be added during the condensation reaction, e.g., by controlled addition. For example, the carrier compound can be a polymer other than a nucleic acid (e.g., spermine or spermidine). pH can also adjusted to favor condensation.

[0616] Methods for producing stable polynucleotide delivery vehicles, which incorporate a polynucleotide/cationic lipid complex as structural components of the delivery vehicle, are further described in, e.g., WO 96/37194, the entire contents of which are incorporated herein by reference. Liposome formation can also include one or more aspects of exemplary methods described in Felgner, P. L. et al., (1987) Proc. Natl. Acad. Sci. USA 8:7413-7417; U.S. Pat. Nos. 4,897,355; 5,171,678; Bangham et al., (1965) M. Mol. Biol. 23:238; Olson et al., (1979) Biochim. Biophys. Acta 557:9; Szoka et al., (1978) Proc. Natl. Acad. Sci. 75: 4194; Mayhew et al., (1984) Biochim. Biophys. Acta 775:169; Kim et al., (1983) Biochim. Biophys. Acta 728:339; and Fukunaga et al., (1984) Endocrinol. 115:757. Commonly used techniques for preparing lipid aggregates of appropriate size for use as delivery vehicles include sonication and freeze-thaw plus extrusion (see, e.g., Mayer et al., (1986) Biochim. Biophys. Acta 858:161. Microfluidization can be used when consistently small (50 to 200 nm) and relatively uniform aggregates are desired (Mayhew et al., (1984) Biochim. Biophys. Acta 775:169. These methods are readily adapted to packaging RNAi agent preparations into liposomes.

[0617] Liposomes fall into two broad classes. Cationic liposomes are positively charged liposomes which interact with the negatively charged nucleic acid molecules to form a stable complex. The positively charged nucleic acid/liposome complex binds to the negatively charged cell surface and is internalized in an endosome. Due to the acidic pH within the endosome, the liposomes are ruptured, releasing their contents into the cell cytoplasm (Wang et al. (1987) Biochem. Biophys. Res. Commun., 147:980-985).

[0618] Liposomes, which are pH-sensitive or negatively charged, entrap nucleic acids rather than complex with them. Since both the nucleic acid and the lipid are similarly charged, repulsion rather than complex formation occurs. Nevertheless, some nucleic acid is entrapped within the aqueous interior of these liposomes. pH sensitive liposomes have been used to deliver nucleic acids encoding the thymidine kinase gene to cell monolayers in culture. Expression of the exogenous gene was detected in the target cells (Zhou et al. (1992) Journal of Controlled Release, 19:269-274).

[0619] One major type of liposomal composition includes phospholipids other than naturally-derived phosphatidylcholine. Neutral liposome compositions, for example, can be formed from dimyristoyl phosphatidylcholine (DMPC) or dipalmitoyl phosphatidylcholine (DPPC). Anionic liposome compositions generally are formed from dimyristoyl phosphatidylglycerol, while anionic fusogenic liposomes are formed primarily from dioleoyl phosphatidylethanolamine (DOPE). Another type of liposomal composition is formed from phosphatidylcholine (PC) such as, for example, soybean PC, and egg PC. Another type is formed from mixtures of phospholipid or phosphatidylcholine or cholesterol.

[0620] Examples of other methods to introduce liposomes into cells in vitro and in vivo include U.S. Pat. Nos. 5,283,185; 5,171,678; WO 94/00569; WO 93/24640; WO 91/16024; Felgner, (1994) J. Biol. Chem. 269:2550; Nabel, (1993) Proc. Natl. Acad. Sci. 90:11307; Nabel, (1992) Human Gene Ther. 3:649; Gershon, (1993) Biochem. 32:7143; and Strauss, (1992) EMBO J. 11:417.

[0621] Non-ionic liposomal systems have also been examined to determine their utility in the delivery of drugs to the skin, in particular systems comprising non-ionic surfactant and cholesterol. Non-ionic liposomal formulations comprising Novasome™ I (glyceryl dilaurate/cholesterol/polyoxyethylene-10-stearyl ether) and Novasome™ II (glyceryl distearate/cholesterol/polyoxyethylene-10-stearyl ether) were used to deliver cyclosporin-A into the dermis of mouse skin. Results indicated that such non-ionic liposomal systems were effective in facilitating the deposition of cyclosporine A into different layers of the skin (Hu et al., (1994) S.T.P.Pharma. Sci., 4(6):466).

[0622] Liposomes also include “sterically stabilized” liposomes, a term which, as used herein, refers to liposomes comprising one or more specialized lipids that, when incorporated into liposomes, result in enhanced circulation lifetimes relative to liposomes lacking such specialized lipids. Examples of sterically stabilized liposomes are those in which part of the vesicle-forming lipid portion of the liposome (A) comprises one or more glycolipids, such as monosialoganglioside G_{M1}, or (B) is derivatized with one or more hydrophilic polymers, such as a polyethylene glycol (PEG) moiety. While not wishing to be bound by any particular theory, it is thought in the art that, at least for sterically stabilized liposomes containing gangliosides, sphingomyelin, or PEG-derivatized lipids, the enhanced circulation half-life of these sterically stabilized liposomes derives from a reduced uptake into cells of the reticuloendothelial system (RES) (Allen et al., (1987) FEBS Letters, 223:42; Wu et al., (1993) Cancer Research, 53:3765).

[0623] Various liposomes comprising one or more glycolipids are known in the art. Papahadjopoulos et al. (Ann. N.Y. Acad. Sci., (1987), 507:64) reported the ability of monosialoganglioside G_{M1}, galactocerebroside sulfate and phosphatidylinositol to improve blood half-lives of liposomes. These findings were expounded upon by Gabizon et al. (Proc. Natl. Acad. Sci. U.S.A., (1988), 85:6949). U.S. Pat. No. 4,837,028 and WO 88/04924, both to Allen et al., disclose liposomes comprising (1) sphingomyelin and (2) the ganglioside G_{M1} or a galactocerebroside sulfate ester. U.S. Pat. No. 5,543,152 (Webb et al.) discloses liposomes comprising sphingomyelin. Liposomes comprising 1,2-sn-dimyristoylphosphatidylcholine are disclosed in WO 97/13499 (Lim et al).

[0624] In one embodiment, cationic liposomes are used. Cationic liposomes possess the advantage of being able to fuse to the cell membrane. Non-cationic liposomes, although not able to fuse as efficiently with the plasma membrane, are taken up by macrophages in vivo and can be used to deliver RNAi agents to macrophages.

[0625] Further advantages of liposomes include: liposomes obtained from natural phospholipids are biocompatible and biodegradable; liposomes can incorporate a wide range of water and lipid soluble drugs; liposomes can protect encapsulated RNAi agents in their internal compartments from metabolism and degradation (Rosoff, in “Pharmaceutical Dosage Forms,” Lieberman, Rieger and Banker (Eds.), 1988, volume 1, p. 245). Important considerations in the preparation of liposome formulations are the lipid surface charge, vesicle size and the aqueous volume of the liposomes.

[0626] A positively charged synthetic cationic lipid, N-[1-(2,3-dioleyloxy)propyl]-N,N,N-trimethylammonium chloride (DOTMA) can be used to form small liposomes that interact spontaneously with nucleic acid to form lipid-nucleic acid complexes which are capable of fusing with the negatively charged lipids of the cell membranes of tissue culture cells, resulting in delivery of RNAi agent (see, e.g., Felgner, P. L. et al., (1987) Proc. Natl. Acad. Sci. USA 8:7413-7417, and U.S. Pat. No. 4,897,355 for a description of DOTMA and its use with DNA).

[0627] A DOTMA analogue, 1,2-bis(oleoyloxy)-3-(trimethylammonia)propane (DOTAP) can be used in combination with a phospholipid to form DNA-complexing vesicles. Lipofectin™ Bethesda Research Laboratories, Gaithersburg, Md.) is an effective agent for the delivery of highly anionic nucleic acids into living tissue culture cells that comprise positively charged DOTMA liposomes which interact spontaneously with negatively charged polynucleotides to form complexes. When enough positively charged liposomes are used, the net charge on the resulting complexes is also positive. Positively charged complexes prepared in this way spontaneously attach to negatively charged cell surfaces, fuse with the plasma membrane, and efficiently deliver functional nucleic acids into, for example, tissue culture cells. Another commercially available cationic lipid, 1,2-bis(oleoyloxy)-3,3-(trimethylammonia)propane (“DOTAP”) (Boehringer Mannheim, Indianapolis, Ind.) differs from DOTMA in that the oleoyl moieties are linked by ester, rather than ether linkages.

[0628] Other reported cationic lipid compounds include those that have been conjugated to a variety of moieties including, for example, carboxyspermine which has been conjugated to one of two types of lipids and includes compounds such as 5-carboxyspermylglycine dioctaoleoylamide (“DOGS”) (Transfectam™, Promega, Madison, Wis.) and dipalmitoylphosphatidylethanolamine 5-carboxyspermyl-amide (“DPPES”) (see, e.g., U.S. Pat. No. 5,171,678).

[0629] Another cationic lipid conjugate includes derivatization of the lipid with cholesterol (“DC-Chol”) which has been formulated into liposomes in combination with DOPE (See, Gao, X. and Huang, L., (1991) Biochim. Biophys. Res. Commun. 179:280). Lipopolylysine, made by conjugating polylysine to DOPE, has been reported to be effective for transfection in the presence of serum (Zhou, X. et al., (1991) Biochim. Biophys. Acta 1065:8). For certain cell lines, these liposomes containing conjugated cationic lipids, are said to exhibit lower toxicity and provide more efficient transfection than the DOTMA-containing compositions. Other commercially available cationic lipid products include DMRIE and DMRIE-HP (Vical, La Jolla, Calif.) and Lipofectamine (DOSPA) (Life Technology, Inc., Gaithersburg, Md.). Other cationic lipids suitable for the delivery of oligonucleotides are described in WO 98/39359 and WO 96/37194.

[0630] Liposomal formulations are particularly suited for topical administration, liposomes present several advantages over other formulations. Such advantages include reduced side effects related to high systemic absorption of the administered drug, increased accumulation of the administered drug at the desired target, and the ability to administer RNAi agent into the skin. In some implementations, liposomes are used for delivering RNAi agent to epidermal cells and also to enhance the penetration of RNAi agent into dermal tissues, e.g., into skin. For example, the liposomes can be applied topically. Topical delivery of drugs formulated as liposomes to the skin has been documented (see, e.g., Weiner et al., (1992) Journal of Drug Targeting, vol. 2,405-410 and du Plessis et al., (1992) Antiviral Research, 18:259-265; Mannino, R. J. and Fould-Fogerite, S., (1998) Biotechniques 6:682-690; Itani, T. et al., (1987) Gene 56:267-276; Nicolau, C. et al. (1987) Meth. Enzymol. 149:157-176; Straubinger, R. M. and Papahadjopoulos, D. (1983) Meth. Enzymol. 101:512-527; Wang, C. Y. and Huang, L., (1987) Proc. Natl. Acad. Sci. USA 84:7851-7855).

[0631] Non-ionic liposomal systems have also been examined to determine their utility in the delivery of drugs to the skin, in particular systems comprising non-ionic surfactant and cholesterol. Non-ionic liposomal formulations comprising Novasome I (glyceryl dilaurate/cholesterol/polyoxyethylene-10-stearyl ether) and Novasome II (glyceryl distearate/cholesterol/polyoxyethylene-10-stearyl ether) were used to deliver a drug into the dermis of mouse skin. Such formulations with RNAi agent are useful for treating a dermatological disorder.

[0632] Liposomes that include RNAi agents can be made highly deformable. Such deformability can enable the liposomes to penetrate through pore that are smaller than the average radius of the liposome. For example, transfersomes are a type of deformable liposomes. Transfersomes can be made by adding surface edge activators, usually surfactants, to a standard liposomal composition. Transfersomes that include RNAi agent can be delivered, for example, subcutaneously by infection in order to deliver RNAi agent to keratinocytes in the skin. In order to cross intact mammalian skin, lipid vesicles must pass through a series of fine pores, each with a diameter less than 50 nm, under the influence of a suitable transdermal gradient. In addition, due to the lipid properties, these transfersomes can be self-optimizing (adaptive to the shape of pores, e.g., in the skin), self-repairing, and can frequently reach their targets without fragmenting, and often self-loading.

[0633] Other formulations amenable to the present disclosure are described in U.S. provisional application Ser. No. 61/018,616, filed Jan. 2, 2008; 61/018,611, filed Jan. 2, 2008; 61/039,748, filed Mar. 26, 2008; 61/047,087, filed Apr. 22, 2008 and 61/051,528, filed May 8, 2008. PCT application number PCT/US2007/080331, filed Oct. 3, 2007, also describes formulations that are amenable to the present disclosure.

[0634] Transfersomes, yet another type of liposomes, are highly deformable lipid aggregates which are attractive candidates for drug delivery vehicles. Transfersomes can be described as lipid droplets which are so highly deformable that they are easily able to penetrate through pores which are smaller than the droplet. Transfersomes are adaptable to the environment in which they are used, e.g., they are self-optimizing (adaptive to the shape of pores in the skin), self-repairing, frequently reach their targets without fragmenting, and often self-loading. To make transfersomes it is possible to add surface edge-activators, usually surfactants, to a standard liposomal composition. Transfersomes have been used to deliver serum albumin to the skin. The transfersomes-mediated delivery of serum albumin has been shown to be as effective as subcutaneous injection of a solution containing serum albumin.

[0635] Surfactants find wide application in formulations such as those described herein, particularly in emulsions (including microemulsions) and liposomes. The most common way of classifying and ranking the properties of the many different types of surfactants, both natural and synthetic, is by the use of the hydrophile/lipophile balance (HLB). The nature of the hydrophilic group (also known as the “head”) provides the most useful means for categorizing the different surfactants used in formulations (Rieger, in Pharmaceutical Dosage Forms, Marcel Dekker, Inc., New York, N.Y., 1988, p. 285).

[0636] If the surfactant molecule is not ionized, it is classified as a nonionic surfactant. Nonionic surfactants find wide application in pharmaceutical and cosmetic products and are usable over a wide range of pH values. In general, their HLB values range from 2 to about 18 depending on their structure. Nonionic surfactants include nonionic esters such as ethylene glycol esters, propylene glycol esters, glyceryl esters, polyglyceryl esters, sorbitan esters, sucrose esters, and ethoxylated esters. Nonionic alkanolamides and ethers such as fatty alcohol ethoxylates, propoxylated alcohols, and ethoxylated/propoxylated block polymers are also included in this class. The polyoxyethylene surfactants are the most popular members of the nonionic surfactant class.

[0637] If the surfactant molecule carries a negative charge when it is dissolved or dispersed in water, the surfactant is classified as anionic. Anionic surfactants include carboxylates such as soaps, acyl lactylates, acyl amides of amino acids, esters of sulfuric acid such as alkyl sulfates and ethoxylated alkyl sulfates, sulfonates such as alkyl benzene sulfonates, acyl isethionates, acyl taurates and sulfosuccinates, and phosphates. The most important members of the anionic surfactant class are the alkyl sulfates and the soaps.

[0638] If the surfactant molecule carries a positive charge when it is dissolved or dispersed in water, the surfactant is classified as cationic. Cationic surfactants include quaternary ammonium salts and ethoxylated amines. The quaternary ammonium salts are the most used members of this class.

[0639] If the surfactant molecule has the ability to carry either a positive or negative charge, the surfactant is classified as amphoteric. Amphoteric surfactants include acrylic acid derivatives, substituted alkylamides, N-alkylbetaines and phosphatides.

The use of surfactants in drug products, formulations and in emulsions has been reviewed (Rieger, in Pharmaceutical Dosage Forms, Marcel Dekker, Inc., New York, N.Y., 1988, p. 285).

[0640] The RNAi agent for use in the methods of the disclosure can also be provided as micellar formulations. “Micelles” are defined herein as a particular type of molecular assembly in which amphipathic molecules are arranged in a spherical structure such that all the hydrophobic portions of the molecules are directed inward, leaving the hydrophilic portions in contact with the surrounding aqueous phase. The converse arrangement exists if the environment is hydrophobic.

[0641] A mixed micellar formulation suitable for delivery through transdermal membranes may be prepared by mixing an aqueous solution of the siRNA composition, an alkali metal C₈ to C₂₂ alkyl sulphate, and a micelle forming compounds. Exemplary micelle forming compounds include lecithin, hyaluronic acid, pharmaceutically acceptable salts of hyaluronic acid, glycolic acid, lactic acid, chamomile extract, cucumber extract, oleic acid, linoleic acid, linolenic acid, monoolein, monooleates, monolaurates, borage oil, evening of primrose oil, menthol, trihydroxy oxo cholanyl glycine and pharmaceutically acceptable salts thereof, glycerin, polyglycerin, lysine, polylysine, triolein, polyoxyethylene ethers and analogues thereof, polidocanol alkyl ethers and analogues thereof, chenodeoxycholate, deoxycholate, and mixtures thereof. The micelle forming compounds may be added at the same time or after addition of the alkali metal alkyl sulphate. Mixed micelles will form with substantially any kind of mixing of the ingredients but vigorous mixing in order to provide smaller size micelles.

[0642] In one method a first micellar composition is prepared which contains the siRNA composition and at least the alkali metal alkyl sulphate. The first micellar composition is then mixed with at least three micelle forming compounds to form a mixed micellar composition. In another method, the micellar composition is prepared by mixing the siRNA composition, the alkali metal alkyl sulphate and at least one of the micelle forming compounds, followed by addition of the remaining micelle forming compounds, with vigorous mixing.

[0643] Phenol or m-cresol may be added to the mixed micellar composition to stabilize the formulation and protect against bacterial growth. Alternatively, phenol or m-cresol may be added with the micelle forming ingredients. An isotonic agent such as glycerin may also be added after formation of the mixed micellar composition.

[0644] For delivery of the micellar formulation as a spray, the formulation can be put into an aerosol dispenser and the dispenser is charged with a propellant. The propellant, which is under pressure, is in liquid form in the dispenser. The ratios of the ingredients are adjusted so that the aqueous and propellant phases become one, i.e., there is one phase. If there are two phases, it is necessary to shake the dispenser prior to dispensing a portion of the contents, e.g., through a metered valve. The dispensed dose of pharmaceutical agent is propelled from the metered valve in a fine spray.

[0645] Propellants may include hydrogen-containing chlorofluorocarbons, hydrogen-containing fluorocarbons, dimethyl ether and diethyl ether. In certain embodiments, HFA 134a (1,1,1,2 tetrafluoroethane) may be used.

[0646] The specific concentrations of the essential ingredients can be determined by relatively straightforward experimentation. For absorption through the oral cavities, it is often desirable to increase, e.g., at least double or triple, the dosage for through injection or administration through the gastrointestinal tract.

[0647] Lipid Particles

[0648] RNAi agents, e.g., dsRNAs of in the disclosure may be fully encapsulated in a lipid formulation, e.g., a LNP, or other nucleic acid-lipid particle.

[0649] As used herein, the term “LNP” refers to a stable nucleic acid-lipid particle. LNPs typically contain a cationic lipid, a non-cationic lipid, and a lipid that prevents aggregation of the particle (e.g., a PEG-lipid conjugate). LNPs are extremely useful for systemic applications, as they exhibit extended circulation lifetimes following intravenous (i.v.) injection and accumulate at distal sites (e.g., sites physically separated from the administration site). LNPs include “pSPLP,” which include an encapsulated condensing agent-nucleic acid complex as set forth in WO 00/03683. The particles of the present disclosure typically have a mean diameter of about 50 nm to about 150 nm, more typically about 60 nm to about 130 nm, more typically about 70 nm to about 110 nm, most typically about 70 nm to about 90 nm, and are substantially nontoxic. In addition, the nucleic acids when present in the nucleic acid-lipid particles of the present disclosure are resistant in aqueous solution to degradation with a nuclease. Nucleic acid-lipid particles and their method of preparation are disclosed in, e.g., U.S. Pat. Nos. 5,976,567; 5,981,501; 6,534,484; 6,586,410; 6,815,432; United States Patent publication No. 2010/0324120 and WO 96/40964.

[0650] In one embodiment, the lipid to drug ratio (mass/mass ratio) (e.g., lipid to dsRNA ratio) will be in the range of from about 1:1 to about 50:1, from about 1:1 to about 25:1, from about 3:1 to about 15:1, from about 4:1 to about 10:1, from about 5:1 to about 9:1, or about 6:1 to about 9:1. Ranges intermediate to the above recited ranges are also contemplated to be part of the disclosure.

[0651] Certain specific LNP formulations for delivery of RNAi agents have been described in the art, including, e.g., “LNP01” formulations as described in, e.g., WO 2008/042973, which is hereby incorporated by reference.

[0652] Additional exemplary lipid-dsRNA formulations are identified in the table below.

| | | cationic lipid/non-cationic |
|---|---|---|
| | | lipid/cholesterol/PEG-lipid conjugate |
| | Ionizable/Cationic Lipid | Lipid:siRNA ratio |
| SNALP-1 | 1,2-Dilinolenyloxy-N,N - | DLinDMA/DPPC/Cholesterol/PEG- |
| | dimethylaminopropane (DLinDMA) | cDMA |
| | | (57.1/7.1/34.4/1.4) |
| | | lipid:siRNA~7:1 |
| 2-XTC | 2,2-Dilinoleyl-4-dimethylaminoethyl-[1,3]- | XTC/DPPC/Cholesterol/PEG-cDMA |
| | dioxolane (XTC) | 57.1/7.1/34.4/1.4 |
| | | lipid:siRNA~7:1 |
| LNP05 | 2,2-Dilinoleyl-4-dimethylaminoethyl-[1,3]- | XTC/DSPC/Cholesterol/PEG-DMG |
| | dioxolane (XTC) | 57.5/7.5/31.5/3.5 |
| | | lipid:siRNA~ 6:1 |
| LNP06 | 2,2-Dilinoleyl-4-dimethylaminoethyl-[1,3]- | XTC/DSPC/Cholesterol/PEG-DMG |
| | dioxolane (XTC) | 57.5/7.5/31.5/3.5 |
| | | lipid:siRNA~11:1 |
| LNP07 | 2,2-Dilinoleyl-4-dimethylaminoethyl-[1,3]- | XTC/DSPC/Cholesterol/PEG-DMG |
| | dioxolane (XTC) | 60/7.5/31/1.5, |
| | | lipid:siRNA - 6:1 |
| LNP08 | 2,2-Dilinoleyl-4-dimethylaminoethyl-[1,3]- | XTC/DSPC/Cholesterol/PEG-DMG |
| | dioxolane (XTC) | 60/7.5/31/1.5, |
| | | lipid:siRNA~11:1 |
| LNP09 | 2,2-Dilinoleyl-4-dimethylaminoethyl-[1,3]- | XTC/DSPC/Cholesterol/PEG-DMG |
| | dioxolane (XTC) | 50/10/38.5/1.5 |
| | | Lipid:siRNA 10:1 |
| LNP10 | (3aR,5s,6aS)-N,N-dimethyl-2,2- | ALN1 OO/DSPC/Cholesterol/PEG- |
| | di((9Z, 12Z) -octadeca-9,12- | DMG |
| | dienyl)tetrahydro-3aH- | 50/10/38.5/1.5 |
| | cyclopenta[d][1,3]dioxol-5-amine | Lipid:siRNA 10:1 |
| | (ALNI 00) | |
| LNP11 | (6Z,9Z,28Z,31Z)-heptatriaconta-6,9,28,31- | MC-3/DSPC/Cholesterol/PEG-DMG |
| | tetraen-19-yl 4-(dimethylamino)butanoate | 50/10/38.5/1.5 |
| | (MC3) | Lipid:siRNA 10:1 |
| LNP12 | 1,1-(2-(4-(2-((2-(bis(2- | Tech Gl/DSPC/Cholesterol/PEG- |
| | hydroxydodecyl)amino)ethyl)(2- | DMG |
| | hydroxydodecyl)amino)ethyl)piperazin-1- | 50/10/38.5/1.5 |
| | yl)ethylazanediyl)didodecan-2-ol (Tech | Lipid:siRNA 10:1 |
| | G1) | |
| LNP13 | XTC | XTC/DSPC/Chol/PEG-DMG |
| | | 50/10/38.5/1.5 |
| | | Lipid:siRNA: 33:1 |
| LNP14 | MC3 | MC3/DSPC/Chol/PEG-DMG |
| | | 40/15/40/5 |
| | | Lipid:siRNA: 11:1 |
| LNP15 | MC3 | MC3/DSPC/Chol/PEG-DSG/GalNAc- |
| | | PEG-DSG |
| | | 50/10/35/4.5/0.5 |
| | | Lipid:siRNA: 11:1 |
| LNP16 | MC3 | MC3/DSPC/Chol/PEG-DMG |
| | | 50/10/38.5/1.5 |
| | | Lipid:siRNA: 7:1 |
| LNP17 | MC3 | MC3/DSPC/Chol/PEG-DSG |
| | | 50/10/38.5/1.5 |
| | | Lipid:siRNA: 10:1 |
| LNP18 | MC3 | MC3/DSPC/Chol/PEG-DMG |
| | | 50/10/38.5/1.5 |
| | | Lipid:siRNA: 12:1 |
| LNP19 | MC3 | MC3/DSPC/Chol/PEG-DMG |
| | | 50/10/35/5 |
| | | Lipid:siRNA: 8:1 |
| LNP20 | MC3 | MC3/DSPC/Chol/PEG-DPG |
| | | 50/10/38.5/1.5 |
| | | Lipid:siRNA: 10:1 |
| LNP21 | C12-200 | C12-200/DSPC/Chol/PEG-DSG |
| | | 50/10/38.5/1.5 |
| | | Lipid:siRNA: 7:1 |
| LNP22 | XTC | XTC/DSPC/Chol/PEG-DSG |
| | | 50/10/38.5/1.5 |
| | | Lipid:siRNA: 10:1 |

DSPC: distearoylphosphatidylcholine
DPPC: dipalmitoylphosphatidylcholine
PEG-DMG:PEG-didimyristoyl glycerol (C14-PEG, or PEG-C14) (PEG with avg mol wt of 2000)
PEG-DSG:PEG-distyryl glycerol (C18-PEG, or PEG-C18) (PEG with avg mol wt of 2000)
PEG-cDMA: PEG-carbamoyl-1,2-dimyristyloxypropylamine (PEG with avg mol wt of 2000)
SNALP (l,2-Dilinolenyloxy-N,N-dimethylaminopropane (DLinDMA)) comprising formulations are described in WO 2009/127060, which is hereby incorporated by reference.
XTC comprising formulations are described in WO 2010/088537, the entire contents of which are hereby incorporated herein by reference.
MC3 comprising formulations are described, e.g., in United States Patent Publication No. 2010/0324120, the entire contents of which are hereby incorporated by reference.
ALNY-100 comprising formulations are described in WO 2010/054406, the entire contents of which are hereby incorporated herein by reference.
C12-200 comprising formulations are described in WO 2010/129709, the entire contents of which are hereby incorporated herein by reference.

[0653] Compositions and formulations for oral administration include powders or granules, microparticulates, nanoparticulates, suspensions or solutions in water or non-aqueous media, capsules, gel capsules, sachets, tablets or minitablets. Thickeners, flavoring agents, diluents, emulsifiers, dispersing aids or binders can be desirable. In some embodiments, oral formulations are those in which dsRNAs featured in the disclosure are administered in conjunction with one or more penetration enhancer surfactants and chelators. Suitable surfactants include fatty acids or esters or salts thereof, bile acids or salts thereof. Suitable bile acids/salts include chenodeoxycholic acid (CDCA) and ursodeoxychenodeoxycholic acid (UDCA), cholic acid, dehydrocholic acid, deoxycholic acid, glucholic acid, glycholic acid, glycodeoxycholic acid, taurocholic acid, taurodeoxycholic acid, sodium tauro-24,25-dihydro-fusidate and sodium glycodihydrofusidate. Suitable fatty acids include arachidonic acid, undecanoic acid, oleic acid, lauric acid, caprylic acid, capric acid, myristic acid, palmitic acid, stearic acid, linoleic acid, linolenic acid, dicaprate, tricaprate, monoolein, dilaurin, glyceryl 1-monocaprate, 1-dodecylazacycloheptan-2-one, an acylcarnitine, an acylcholine, or a monoglyceride, a diglyceride or a pharmaceutically acceptable salt thereof (e.g., sodium). In some embodiments, combinations of penetration enhancers are used, for example, fatty acids/salts in combination with bile acids/salts. One exemplary combination is the sodium salt of lauric acid, capric acid and UDCA. Further penetration enhancers include polyoxyethylene-9-lauryl ether, polyoxyethylene-20-cetyl ether. DsRNAs featured in the disclosure can be delivered orally, in granular form including sprayed dried particles, or complexed to form micro or nanoparticles. DsRNA complexing agents include poly-amino acids; polyimines; polyacrylates; polyalkylacrylates, polyoxethanes, polyalkylcyanoacrylates; cationized gelatins, albumins, starches, acrylates, polyethyleneglycols (PEG) and starches; polyalkylcyanoacrylates; DEAE-derivatized polyimines, pollulans, celluloses and starches. Suitable complexing agents include chitosan, N-trimethylchitosan, poly-L-lysine, polyhistidine, polyornithine, polyspermines, protamine, polyvinylpyridine, polythiodiethylaminomethylethylene P(TDAE), polyaminostyrene (e.g., p-amino), poly(methylcyanoacrylate), poly(ethylcyanoacrylate), poly(butylcyanoacrylate), poly(isobutylcyanoacrylate), poly(isohexylcynaoacrylate), DEAE-methacrylate, DEAE-hexylacrylate, DEAE-acrylamide, DEAE-albumin and DEAE-dextran, polymethylacrylate, polyhexylacrylate, poly(D,L-lactic acid), poly(DL-lactic-co-glycolic acid (PLGA), alginate, and polyethyleneglycol (PEG). Oral formulations for dsRNAs and their preparation are described in detail in U.S. Pat. No. 6,887,906, U.S. 2003/0027780, and U.S. Pat. No. 6,747,014, each of which is incorporated herein by reference.

[0654] Compositions and formulations for parenteral, intraparenchymal (into the brain), intrathecal, intraventricular or intrahepatic administration can include sterile aqueous solutions which can also contain buffers, diluents and other suitable additives such as, but not limited to, penetration enhancers, carrier compounds and other pharmaceutically acceptable carriers or excipients.

[0655] Pharmaceutical compositions of the present disclosure include, but are not limited to, solutions, emulsions, and liposome-containing formulations. These compositions can be generated from a variety of components that include, but are not limited to, preformed liquids, self-emulsifying solids and self-emulsifying semisolids. Particularly preferred are formulations that target the brain when treating APP-associated diseases or disorders.

[0656] The pharmaceutical formulations of the present disclosure, which can conveniently be presented in unit dosage form, can be prepared according to conventional techniques well known in the pharmaceutical industry. Such techniques include the step of bringing into association the active ingredients with the pharmaceutical carrier(s) or excipient(s). In general, the formulations are prepared by uniformly and intimately bringing into association the active ingredients with liquid carriers or finely divided solid carriers or both, and then, if necessary, shaping the product.

[0657] The compositions of the present disclosure can be formulated into any of many possible dosage forms such as, but not limited to, tablets, capsules, gel capsules, liquid syrups, soft gels, suppositories, and enemas. The compositions of the present disclosure can also be formulated as suspensions in aqueous, non-aqueous or mixed media. Aqueous suspensions can further contain substances which increase the viscosity of the suspension including, for example, sodium carboxymethylcellulose, sorbitol or dextran. The suspension can also contain stabilizers.

[0658] Additional Formulations

[0659] i. Emulsions

[0660] The compositions of the present disclosure can be prepared and formulated as emulsions. Emulsions are typically heterogeneous systems of one liquid dispersed in another in the form of droplets usually exceeding 0.1 μm in diameter (see e.g., Ansel's Pharmaceutical Dosage Forms and Drug Delivery Systems, Allen, L V., Popovich N G., and Ansel H C., 2004, Lippincott Williams & Wilkins (8th ed.), New York, N.Y.; Idson, in Pharmaceutical Dosage Forms, Lieberman, Rieger and Banker (Eds.), 1988, Marcel Dekker, Inc., New York, N.Y., volume 1, p. 199; Rosoff, in Pharmaceutical Dosage Forms, Lieberman, Rieger and Banker (Eds.), 1988, Marcel Dekker, Inc., New York, N.Y., Volume 1, p. 245; Block in Pharmaceutical Dosage Forms, Lieberman, Rieger and Banker (Eds.), 1988, Marcel Dekker, Inc., New York, N.Y., volume 2, p. 335; Higuchi et al., in Remington's Pharmaceutical Sciences, Mack Publishing Co., Easton, Pa., 1985, p. 301). Emulsions are often biphasic systems comprising two immiscible liquid phases intimately mixed and dispersed with each other. In general, emulsions can be of either the water-in-oil (w/o) or the oil-in-water (o/w) variety. When an aqueous phase is finely divided into and dispersed as minute droplets into a bulk oily phase, the resulting composition is called a water-in-oil (w/o) emulsion. Alternatively, when an oily phase is finely divided into and dispersed as minute droplets into a bulk aqueous phase, the resulting composition is called an oil-in-water (o/w) emulsion. Emulsions can contain additional components in addition to the dispersed phases, and the active drug which can be present as a solution in either aqueous phase, oily phase or itself as a separate phase. Pharmaceutical excipients such as emulsifiers, stabilizers, dyes, and anti-oxidants can also be present in emulsions as needed. Pharmaceutical emulsions can also be multiple emulsions that are comprised of more than two phases such as, for example, in the case of oil-in-water-in-oil (o/w/o) and water-in-oil-in-water (w/o/w) emulsions. Such complex formulations often provide certain advantages that simple binary emulsions do not. Multiple emulsions in which individual oil droplets of an o/w emulsion enclose small water droplets constitute a w/o/w emulsion. Likewise, a system of oil droplets enclosed in globules of water stabilized in an oily continuous phase provides an o/w/o emulsion.

[0661] Emulsions are characterized by little or no thermodynamic stability. Often, the dispersed or discontinuous phase of the emulsion is well dispersed into the external or continuous phase and maintained in this form through the means of emulsifiers or the viscosity of the formulation. Either of the phases of the emulsion can be a semisolid or a solid, as is the case of emulsion-style ointment bases and creams Other means of stabilizing emulsions entail the use of emulsifiers that can be incorporated into either phase of the emulsion. Emulsifiers can broadly be classified into four categories: synthetic surfactants, naturally occurring emulsifiers, absorption bases, and finely dispersed solids (see e.g., Ansel's Pharmaceutical Dosage Forms and Drug Delivery Systems, Allen, L V., Popovich N G., and Ansel H C., 2004, Lippincott Williams & Wilkins (8th ed.), New York, N.Y.; Idson, in Pharmaceutical Dosage Forms, Lieberman, Rieger and Banker (Eds.), 1988, Marcel Dekker, Inc., New York, N.Y., volume 1, p. 199).

[0662] Synthetic surfactants, also known as surface active agents, have found wide applicability in the formulation of emulsions and have been reviewed in the literature (see e.g., Ansel's Pharmaceutical Dosage Forms and Drug Delivery Systems, Allen, L V., Popovich N G., and Ansel H C., 2004, Lippincott Williams & Wilkins (8th ed.), New York, N.Y.; Rieger, in Pharmaceutical Dosage Forms, Lieberman, Rieger and Banker (Eds.), 1988, Marcel Dekker, Inc., New York, N.Y., volume 1, p. 285; Idson, in Pharmaceutical Dosage Forms, Lieberman, Rieger and Banker (Eds.), Marcel Dekker, Inc., New York, N.Y., 1988, volume 1, p. 199). Surfactants are typically amphiphilic and comprise a hydrophilic and a hydrophobic portion. The ratio of the hydrophilic to the hydrophobic nature of the surfactant has been termed the hydrophile/lipophile balance (HLB) and is a valuable tool in categorizing and selecting surfactants in the preparation of formulations. Surfactants can be classified into different classes based on the nature of the hydrophilic group: nonionic, anionic, cationic and amphoteric (see e.g., Ansel's Pharmaceutical Dosage Forms and Drug Delivery Systems, Allen, L V., Popovich N G., and Ansel H C., 2004, Lippincott Williams & Wilkins (8th ed.), New York, N.Y. Rieger, in Pharmaceutical Dosage Forms, Lieberman, Rieger and Banker (Eds.), 1988, Marcel Dekker, Inc., New York, N.Y., volume 1, p. 285).

[0663] Naturally occurring emulsifiers used in emulsion formulations include lanolin, beeswax, phosphatides, lecithin and acacia. Absorption bases possess hydrophilic properties such that they can soak up water to form w/o emulsions yet retain their semisolid consistencies, such as anhydrous lanolin and hydrophilic petrolatum. Finely divided solids have also been used as good emulsifiers especially in combination with surfactants and in viscous preparations. These include polar inorganic solids, such as heavy metal hydroxides, nonswelling clays such as bentonite, attapulgite, hectorite, kaolin, montmorillonite, colloidal aluminum silicate and colloidal magnesium aluminum silicate, pigments and nonpolar solids such as carbon or glyceryl tristearate.

[0664] A large variety of non-emulsifying materials are also included in emulsion formulations and contribute to the properties of emulsions. These include fats, oils, waxes, fatty acids, fatty alcohols, fatty esters, humectants, hydrophilic colloids, preservatives and antioxidants (Block, in Pharmaceutical Dosage Forms, Lieberman, Rieger and Banker (Eds.), 1988, Marcel Dekker, Inc., New York, N.Y., volume 1, p. 335; Idson, in Pharmaceutical Dosage Forms, Lieberman, Rieger and Banker (Eds.), 1988, Marcel Dekker, Inc., New York, N.Y., volume 1, p. 199).

[0665] Hydrophilic colloids or hydrocolloids include naturally occurring gums and synthetic polymers such as polysaccharides (for example, acacia, agar, alginic acid, carrageenan, guar gum, karaya gum, and tragacanth), cellulose derivatives (for example, carboxymethylcellulose and carboxypropylcellulose), and synthetic polymers (for example, carbomers, cellulose ethers, and carboxyvinyl polymers). These disperse or swell in water to form colloidal solutions that stabilize emulsions by forming strong interfacial films around the dispersed-phase droplets and by increasing the viscosity of the external phase.

[0666] Since emulsions often contain a number of ingredients such as carbohydrates, proteins, sterols and phosphatides that can readily support the growth of microbes, these formulations often incorporate preservatives. Commonly used preservatives included in emulsion formulations include methyl paraben, propyl paraben, quaternary ammonium salts, benzalkonium chloride, esters of p-hydroxybenzoic acid, and boric acid. Antioxidants are also commonly added to emulsion formulations to prevent deterioration of the formulation. Antioxidants used can be free radical scavengers such as tocopherols, alkyl gallates, butylated hydroxyanisole, butylated hydroxytoluene, or reducing agents such as ascorbic acid and sodium metabisulfite, and antioxidant synergists such as citric acid, tartaric acid, and lecithin.

[0667] The application of emulsion formulations via dermatological, oral and parenteral routes and methods for their manufacture have been reviewed in the literature (see e.g., Ansel's Pharmaceutical Dosage Forms and Drug Delivery Systems, Allen, L V., Popovich N G., and Ansel H C., 2004, Lippincott Williams & Wilkins (8th ed.), New York, N.Y.; Idson, in Pharmaceutical Dosage Forms, Lieberman, Rieger and Banker (Eds.), 1988, Marcel Dekker, Inc., New York, N.Y., volume 1, p. 199). Emulsion formulations for oral delivery have been very widely used because of ease of formulation, as well as efficacy from an absorption and bioavailability standpoint (see e.g., Ansel's Pharmaceutical Dosage Forms and Drug Delivery Systems, Allen, L V., Popovich N G., and Ansel H C., 2004, Lippincott Williams & Wilkins (8th ed.), New York, N.Y.; Rosoff, in Pharmaceutical Dosage Forms, Lieberman, Rieger and Banker (Eds.), 1988, Marcel Dekker, Inc., New York, N.Y., volume 1, p. 245; Idson, in Pharmaceutical Dosage Forms, Lieberman, Rieger and Banker (Eds.), 1988, Marcel Dekker, Inc., New York, N.Y., volume 1, p. 199). Mineral-oil base laxatives, oil-soluble vitamins and high fat nutritive preparations are among the materials that have commonly been administered orally as o/w emulsions.

[0668] ii. Microemulsions

[0669] In one embodiment of the present disclosure, the compositions of RNAi agents and nucleic acids are formulated as microemulsions. A microemulsion can be defined as a system of water, oil and amphiphile which is a single optically isotropic and thermodynamically stable liquid solution (see e.g., Ansel's Pharmaceutical Dosage Forms and Drug Delivery Systems, Allen, L V., Popovich N G., and Ansel H C., 2004, Lippincott Williams & Wilkins (8th ed.), New York, N.Y.; Rosoff, in Pharmaceutical Dosage Forms, Lieberman, Rieger and Banker (Eds.), 1988, Marcel Dekker, Inc., New York, N.Y., volume 1, p. 245). Typically, microemulsions are systems that are prepared by first dispersing an oil in an aqueous surfactant solution and then adding a sufficient amount of a fourth component, generally an intermediate chain-length alcohol to form a transparent system. Therefore, microemulsions have also been described as thermodynamically stable, isotropically clear dispersions of two immiscible liquids that are stabilized by interfacial films of surface-active molecules (Leung and Shah, in: Controlled Release of Drugs: Polymers and Aggregate Systems, Rosoff, M., Ed., 1989, VCH Publishers, New York, pages 185-215). Microemulsions commonly are prepared via a combination of three to five components that include oil, water, surfactant, cosurfactant and electrolyte. Whether the microemulsion is of the water-in-oil (w/o) or an oil-in-water (o/w) type is dependent on the properties of the oil and surfactant used, and on the structure and geometric packing of the polar heads and hydrocarbon tails of the surfactant molecules (Schott, in Remington's Pharmaceutical Sciences, Mack Publishing Co., Easton, Pa., 1985, p. 271).

[0670] The phenomenological approach utilizing phase diagrams has been extensively studied and has yielded a comprehensive knowledge, to one skilled in the art, of how to formulate microemulsions (see e.g., Ansel's Pharmaceutical Dosage Forms and Drug Delivery Systems, Allen, L V., Popovich N G., and Ansel H C., 2004, Lippincott Williams & Wilkins (8th ed.), New York, N.Y.; Rosoff, in Pharmaceutical Dosage Forms, Lieberman, Rieger and Banker (Eds.), 1988, Marcel Dekker, Inc., New York, N.Y., volume 1, p. 245; Block, in Pharmaceutical Dosage Forms, Lieberman, Rieger and Banker (Eds.), 1988, Marcel Dekker, Inc., New York, N.Y., volume 1, p. 335). Compared to conventional emulsions, microemulsions offer the advantage of solubilizing water-insoluble drugs in a formulation of thermodynamically stable droplets that are formed spontaneously.

[0671] Surfactants used in the preparation of microemulsions include, but are not limited to, ionic surfactants, non-ionic surfactants, Brij 96, polyoxyethylene oleyl ethers, polyglycerol fatty acid esters, tetraglycerol monolaurate (ML310), tetraglycerol monooleate (MO310), hexaglycerol monooleate (PO310), hexaglycerol pentaoleate (PO500), decaglycerol monocaprate (MCA750), decaglycerol monooleate (MO750), decaglycerol sequioleate (SO750), decaglycerol decaoleate (DAO750), alone or in combination with cosurfactants. The cosurfactant, usually a short-chain alcohol such as ethanol, 1-propanol, and 1-butanol, serves to increase the interfacial fluidity by penetrating into the surfactant film and consequently creating a disordered film because of the void space generated among surfactant molecules. Microemulsions can, however, be prepared without the use of cosurfactants and alcohol-free self-emulsifying microemulsion systems are known in the art. The aqueous phase can typically be, but is not limited to, water, an aqueous solution of the drug, glycerol, PEG300, PEG400, polyglycerols, propylene glycols, and derivatives of ethylene glycol. The oil phase can include, but is not limited to, materials such as Captex 300, Captex 355, Capmul MCM, fatty acid esters, medium chain (C8-C12) mono, di, and tri-glycerides, polyoxyethylated glyceryl fatty acid esters, fatty alcohols, polyglycolized glycerides, saturated polyglycolized C8-C10 glycerides, vegetable oils and silicone oil.

[0672] Microemulsions are particularly of interest from the standpoint of drug solubilization and the enhanced absorption of drugs. Lipid based microemulsions (both o/w and w/o) have been proposed to enhance the oral bioavailability of drugs, including peptides (see e.g., U.S. Pat. Nos. 6,191,105; 7,063,860; 7,070,802; 7,157,099; Constantinides et al., Pharmaceutical Research, 1994, 11, 1385-1390; Ritschel, Meth. Find. Exp. Clin. Pharmacol., 1993, 13, 205). Microemulsions afford advantages of improved drug solubilization, protection of drug from enzymatic hydrolysis, possible enhancement of drug absorption due to surfactant-induced alterations in membrane fluidity and permeability, ease of preparation, ease of oral administration over solid dosage forms, improved clinical potency, and decreased toxicity (see e.g., U.S. Pat. Nos. 6,191,105; 7,063,860; 7,070,802; 7,157,099; Constantinides et al., Pharmaceutical Research, 1994, 11, 1385; Ho et al., J. Pharm. Sci., 1996, 85, 138-143). Often microemulsions can form spontaneously when their components are brought together at ambient temperature. This can be particularly advantageous when formulating thermolabile drugs, peptides or RNAi agents. Microemulsions have also been effective in the transdermal delivery of active components in both cosmetic and pharmaceutical applications. It is expected that the microemulsion compositions and formulations of the present disclosure will facilitate the increased systemic absorption of RNAi agents and nucleic acids from the gastrointestinal tract, as well as improve the local cellular uptake of RNAi agents and nucleic acids.

[0673] Microemulsions of the present disclosure can also contain additional components and additives such as sorbitan monostearate (Grill 3), Labrasol, and penetration enhancers to improve the properties of the formulation and to enhance the absorption of the RNAi agents and nucleic acids of the present disclosure. Penetration enhancers used in the microemulsions of the present disclosure can be classified as belonging to one of five broad categories—surfactants, fatty acids, bile salts, chelating agents, and non-chelating non-surfactants (Lee et al., Critical Reviews in Therapeutic Drug Carrier Systems, 1991, p. 92). Each of these classes has been discussed above.

[0674] iii. Microparticles

[0675] An RNAi agent of the disclosure may be incorporated into a particle, e.g., a microparticle. Microparticles can be produced by spray-drying, but may also be produced by other methods including lyophilization, evaporation, fluid bed drying, vacuum drying, or a combination of these techniques.

[0676] iv. Penetration Enhancers

[0677] In one embodiment, the present disclosure employs various penetration enhancers to effect the efficient delivery of nucleic acids, particularly RNAi agents, to the skin of animals. Most drugs are present in solution in both ionized and nonionized forms. However, usually only lipid soluble or lipophilic drugs readily cross cell membranes. It has been discovered that even non-lipophilic drugs can cross cell membranes if the membrane to be crossed is treated with a penetration enhancer. In addition to aiding the diffusion of non-lipophilic drugs across cell membranes, penetration enhancers also enhance the permeability of lipophilic drugs.

[0678] Penetration enhancers can be classified as belonging to one of five broad categories, i.e., surfactants, fatty acids, bile salts, chelating agents, and non-chelating non-surfactants (see e.g., Malmsten, M. Surfactants and polymers in drug delivery, Informa Health Care, New York, N.Y., 2002; Lee et al., Critical Reviews in Therapeutic Drug Carrier Systems, 1991, p.92). Each of the above mentioned classes of penetration enhancers are described below in greater detail.

[0679] Surfactants (or “surface-active agents”) are chemical entities which, when dissolved in an aqueous solution, reduce the surface tension of the solution or the interfacial tension between the aqueous solution and another liquid, with the result that absorption of RNAi agents through the mucosa is enhanced. In addition to bile salts and fatty acids, these penetration enhancers include, for example, sodium lauryl sulfate, polyoxyethylene-9-lauryl ether and polyoxyethylene-20-cetyl ether) (see e.g., Malmsten, M. Surfactants and polymers in drug delivery, Informa Health Care, New York, N.Y., 2002; Lee et al., Critical Reviews in Therapeutic Drug Carrier Systems, 1991, p.92); and perfluorochemical emulsions, such as FC-43. Takahashi et al., J. Pharm. Pharmacol., 1988, 40, 252).

[0680] Various fatty acids and their derivatives which act as penetration enhancers include, for example, oleic acid, lauric acid, capric acid (n-decanoic acid), myristic acid, palmitic acid, stearic acid, linoleic acid, linolenic acid, dicaprate, tricaprate, monoolein (1-monooleoyl-rac-glycerol), dilaurin, caprylic acid, arachidonic acid, glycerol 1-monocaprate, 1-dodecylazacycloheptan-2-one, acylcarnitines, acylcholines, C1-20 alkyl esters thereof (e.g., methyl, isopropyl and t-butyl), and mono- and di-glycerides thereof (i.e., oleate, laurate, caprate, myristate, palmitate, stearate, linoleate, etc.) (see e.g., Touitou, E., et al. Enhancement in Drug Delivery, CRC Press, Danvers, Mass., 2006; Lee et al., Critical Reviews in Therapeutic Drug Carrier Systems, 1991, p.92; Muranishi, Critical Reviews in Therapeutic Drug Carrier Systems, 1990, 7, 1-33; El Hariri et al., J. Pharm. Pharmacol., 1992, 44, 651-654).

[0681] The physiological role of bile includes the facilitation of dispersion and absorption of lipids and fat-soluble vitamins (see e.g., Malmsten, M. Surfactants and polymers in drug delivery, Informa Health Care, New York, N.Y., 2002; Brunton, Chapter 38 in: Goodman & Gilman's The Pharmacological Basis of Therapeutics, 9th Ed., Hardman et al. Eds., McGraw-Hill, New York, 1996, pp. 934-935). Various natural bile salts, and their synthetic derivatives, act as penetration enhancers. Thus the term “bile salts” includes any of the naturally occurring components of bile as well as any of their synthetic derivatives. Suitable bile salts include, for example, cholic acid (or its pharmaceutically acceptable sodium salt, sodium cholate), dehydrocholic acid (sodium dehydrocholate), deoxycholic acid (sodium deoxycholate), glucholic acid (sodium glucholate), glycholic acid (sodium glycocholate), glycodeoxycholic acid (sodium glycodeoxycholate), taurocholic acid (sodium taurocholate), taurodeoxycholic acid (sodium taurodeoxycholate), chenodeoxycholic acid (sodium chenodeoxycholate), ursodeoxycholic acid (UDCA), sodium tauro-24,25-dihydro-fusidate (STDHF), sodium glycodihydrofusidate and polyoxyethylene-9-lauryl ether (POE) (see e.g., Malmsten, M. Surfactants and polymers in drug delivery, Informa Health Care, New York, N.Y., 2002; Lee et al., Critical Reviews in Therapeutic Drug Carrier Systems, 1991, page 92; Swinyard, Chapter 39 In: Remington's Pharmaceutical Sciences, 18th Ed., Gennaro, ed., Mack Publishing Co., Easton, Pa., 1990, pages 782-783; Muranishi, Critical Reviews in Therapeutic Drug Carrier Systems, 1990, 7, 1-33; Yamamoto et al., J. Pharm. Exp. Ther., 1992, 263, 25; Yamashita et al., J. Pharm. Sci., 1990, 79, 579-583).

[0682] Chelating agents, as used in connection with the present disclosure, can be defined as compounds that remove metallic ions from solution by forming complexes therewith, with the result that absorption of RNAi agents through the mucosa is enhanced. With regards to their use as penetration enhancers in the present disclosure, chelating agents have the added advantage of also serving as DNase inhibitors, as most characterized DNA nucleases require a divalent metal ion for catalysis and are thus inhibited by chelating agents (Jarrett, J. Chromatogr., 1993, 618, 315-339). Suitable chelating agents include but are not limited to disodium ethylenediaminetetraacetate (EDTA), citric acid, salicylates (e.g., sodium salicylate, 5-methoxysalicylate and homovanilate), N-acyl derivatives of collagen, laureth-9 and N-amino acyl derivatives of beta-diketones (enamines)(see e.g., Katdare, A. et al., Excipient development for pharmaceutical, biotechnology, and drug delivery, CRC Press, Danvers, Mass., 2006; Lee et al., Critical Reviews in Therapeutic Drug Carrier Systems, 1991, page 92; Muranishi, Critical Reviews in Therapeutic Drug Carrier Systems, 1990, 7, 1-33; Buur et al., J. Control Rd., 1990, 14, 43-51).

[0683] As used herein, non-chelating non-surfactant penetration enhancing compounds can be defined as compounds that demonstrate insignificant activity as chelating agents or as surfactants but that nonetheless enhance absorption of RNAi agents through the alimentary mucosa (see e.g., Muranishi, Critical Reviews in Therapeutic Drug Carrier Systems, 1990, 7, 1-33). This class of penetration enhancers includes, for example, unsaturated cyclic ureas, 1-alkyl- and 1-alkenylazacyclo-alkanone derivatives (Lee et al., Critical Reviews in Therapeutic Drug Carrier Systems, 1991, page 92); and non-steroidal anti-inflammatory agents such as diclofenac sodium, indomethacin and phenylbutazone (Yamashita et al., J. Pharm. Pharmacol., 1987, 39, 621-626).

[0684] Agents that enhance uptake of RNAi agents at the cellular level can also be added to the pharmaceutical and other compositions of the present disclosure. For example, cationic lipids, such as lipofectin (Junichi et al, U.S. Pat. No. 5,705,188), cationic glycerol derivatives, and polycationic molecules, such as polylysine (WO 97/30731), are also known to enhance the cellular uptake of dsRNAs.

[0685] Other agents can be utilized to enhance the penetration of the administered nucleic acids, including glycols such as ethylene glycol and propylene glycol, pyrrols such as 2-pyrrol, azones, and terpenes such as limonene and menthone.

[0686] vi. Excipients

[0687] In contrast to a carrier compound, a “pharmaceutical carrier” or “excipient” is a pharmaceutically acceptable solvent, suspending agent or any other pharmacologically inert vehicle for delivering one or more nucleic acids to an animal. The excipient can be liquid or solid and is selected, with the planned manner of administration in mind, so as to provide for the desired bulk, consistency, etc., when combined with a nucleic acid and the other components of a given pharmaceutical composition. Typical pharmaceutical carriers include, but are not limited to, binding agents (e.g., pregelatinized maize starch, polyvinylpyrrolidone or hydroxypropyl methylcellulose, etc.); fillers (e.g., lactose and other sugars, microcrystalline cellulose, pectin, gelatin, calcium sulfate, ethyl cellulose, polyacrylates or calcium hydrogen phosphate, etc.); lubricants (e.g., magnesium stearate, talc, silica, colloidal silicon dioxide, stearic acid, metallic stearates, hydrogenated vegetable oils, corn starch, polyethylene glycols, sodium benzoate, sodium acetate, etc.); disintegrants (e.g., starch, sodium starch glycolate, etc.); and wetting agents (e.g., sodium lauryl sulphate, etc).

[0688] Pharmaceutically acceptable organic or inorganic excipients suitable for non-parenteral administration which do not deleteriously react with nucleic acids can also be used to formulate the compositions of the present disclosure. Suitable pharmaceutically acceptable carriers include, but are not limited to, water, salt solutions, alcohols, polyethylene glycols, gelatin, lactose, amylose, magnesium stearate, talc, silicic acid, viscous paraffin, hydroxymethylcellulose, polyvinylpyrrolidone and the like.

[0689] Formulations for topical administration of nucleic acids can include sterile and non-sterile aqueous solutions, non-aqueous solutions in common solvents such as alcohols, or solutions of the nucleic acids in liquid or solid oil bases. The solutions can also contain buffers, diluents and other suitable additives. Pharmaceutically acceptable organic or inorganic excipients suitable for non-parenteral administration which do not deleteriously react with nucleic acids can be used.

[0690] Suitable pharmaceutically acceptable excipients include, but are not limited to, water, salt solutions, alcohol, polyethylene glycols, gelatin, lactose, amylose, magnesium stearate, talc, silicic acid, viscous paraffin, hydroxymethylcellulose, polyvinylpyrrolidone and the like.

[0691] vii. Other Components

[0692] The compositions of the present disclosure can additionally contain other adjunct components conventionally found in pharmaceutical compositions, at their art-established usage levels. Thus, for example, the compositions can contain additional, compatible, pharmaceutically-active materials such as, for example, antipruritics, astringents, local anesthetics or anti-inflammatory agents, or can contain additional materials useful in physically formulating various dosage forms of the compositions of the present disclosure, such as dyes, flavoring agents, preservatives, antioxidants, opacifiers, thickening agents and stabilizers. However, such materials, when added, should not unduly interfere with the biological activities of the components of the compositions of the present disclosure. The formulations can be sterilized and, if desired, mixed with auxiliary agents, e.g., lubricants, preservatives, stabilizers, wetting agents, emulsifiers, salts for influencing osmotic pressure, buffers, colorings, flavorings or aromatic substances and the like which do not deleteriously interact with the nucleic acid(s) of the formulation.

[0693] Aqueous suspensions can contain substances which increase the viscosity of the suspension including, for example, sodium carboxymethylcellulose, sorbitol or dextran. The suspension can also contain stabilizers.

[0694] In some embodiments, pharmaceutical compositions featured in the disclosure include (a) one or more RNAi agents and (b) one or more agents which function by a non-RNAi mechanism and which are useful in treating an RPS25-associated disorder. Examples of such agents include, but are not limited to SSRIs, venlafaxine, bupropion, and atypical antipsychotics.

[0695] Toxicity and therapeutic efficacy of such compounds can be determined by standard pharmaceutical procedures in cell cultures or experimental animals, e.g., for determining the LD₅₀ (the dose lethal to 50% of the population) and the ED₅₀ (the dose therapeutically effective in 50% of the population). The dose ratio between toxic and therapeutic effects is the therapeutic index and it can be expressed as the ratio LD₅₀/ED₅₀. Compounds that exhibit high therapeutic indices are preferred.

[0696] The data obtained from cell culture assays and animal studies can be used in formulating a range of dosage for use in humans. The dosage of compositions featured herein in the disclosure lies generally within a range of circulating concentrations that include the ED₅₀ with little or no toxicity. The dosage can vary within this range depending upon the dosage form employed and the route of administration utilized. For any compound used in the methods featured in the disclosure, the therapeutically effective dose can be estimated initially from cell culture assays. A dose can be formulated in animal models to achieve a circulating plasma concentration range of the compound or, when appropriate, of the polypeptide product of a target sequence (e.g., achieving a decreased concentration of the polypeptide) that includes the IC₅₀ (i.e., the concentration of the test compound which achieves a half-maximal inhibition of symptoms) as determined in cell culture. Such information can be used to more accurately determine useful doses in humans. Levels in plasma can be measured, for example, by high performance liquid chromatography.

[0697] In addition to their administration, as discussed above, the RNAi agents featured in the disclosure can be administered in combination with other known agents effective in treatment of pathological processes mediated by nucleotide repeat expression. In any event, the administering physician can adjust the amount and timing of RNAi agent administration on the basis of results observed using standard measures of efficacy known in the art or described herein.

### VIII. Kits

[0698] In certain aspects, the instant disclosure provides kits that include a suitable container containing a pharmaceutical formulation of a siRNA compound, e.g., a double-stranded siRNA compound, or ssiRNA compound, (e.g., a precursor, e.g., a larger siRNA compound which can be processed into a ssiRNA compound, or a DNA which encodes an siRNA compound, e.g., a double-stranded siRNA compound, or ssiRNA compound, or precursor thereof). In certain embodiments the individual components of the pharmaceutical formulation may be provided in one container. Alternatively, it may be desirable to provide the components of the pharmaceutical formulation separately in two or more containers, e.g., one container for a siRNA compound preparation, and at least another for a carrier compound. The kit may be packaged in a number of different configurations such as one or more containers in a single box. The different components can be combined, e.g., according to instructions provided with the kit. The components can be combined according to a method described herein, e.g., to prepare and administer a pharmaceutical composition. The kit can also include a delivery device.

### IX. Methods for Inhibiting RPS25 Expression

[0699] The present disclosure also provides methods of inhibiting expression of an RPS25 gene in a cell. The methods include contacting a cell with an RNAi agent, e.g., double stranded RNAi agent, in an amount effective to inhibit expression of RPS25 in the cell, thereby inhibiting expression of RPS25 in the cell. In certain embodiments of the disclosure, RPS25 is inhibited preferentially in CNS (e.g., brain) cells.

[0700] Contacting of a cell with a RNAi agent, e.g., a double stranded RNAi agent, may be done in vitro or in vivo. Contacting a cell in vivo with the RNAi agent includes contacting a cell or group of cells within a subject, e.g., a human subject, with the RNAi agent. Combinations of in vitro and in vivo methods of contacting a cell are also possible.

[0701] Contacting a cell may be direct or indirect, as discussed above. Furthermore, contacting a cell may be accomplished via a targeting ligand, including any ligand described herein or known in the art. In some embodiments, the targeting ligand is a carbohydrate moiety, e.g., a GalNAc ligand, or any other ligand that directs the RNAi agent to a site of interest.

[0702] The term “inhibiting,” as used herein, is used interchangeably with “reducing,” “silencing,” “downregulating,” “suppressing” and other similar terms, and includes any level of inhibition. In certain embodiments, a level of inhibition, e.g., for an RNAi agent of the instant disclosure, can be assessed in cell culture conditions, e.g., wherein cells in cell culture are transfected via Lipofectamine™-mediated transfection at a concentration in the vicinity of a cell of 10 nM or less, 1 nM or less, etc. Knockdown of a given RNAi agent can be determined via comparison of pre-treated levels in cell culture versus post-treated levels in cell culture, optionally also comparing against cells treated in parallel with a scrambled or other form of control RNAi agent. Knockdown in cell culture of, e.g., preferably 50% or more, can thereby be identified as indicative of “inhibiting” or “reducing”, “downregulating” or “suppressing”, etc. having occurred. It is expressly contemplated that assessment of targeted mRNA or encoded protein levels (and therefore an extent of “inhibiting”, etc. caused by a RNAi agent of the disclosure) can also be assessed in in vivo systems for the RNAi agents of the instant disclosure, under properly controlled conditions as described in the art.

[0703] The phrase “inhibiting expression of an RPS25 gene” or “inhibiting expression of RPS25,” as used herein, includes inhibition of expression of any RPS25 gene (such as, e.g., a mouse RPS25 gene, a rat RPS25 gene, a monkey RPS25 gene, or a human RPS25 gene) as well as variants or mutants of an RPS25 gene that encode an RPS25 protein. Thus, the RPS25 gene may be a wild-type RPS25 gene, a mutant RPS25 gene, or a transgenic RPS25 gene in the context of a genetically manipulated cell, group of cells, or organism.

[0704] “Inhibiting expression of an RPS25 gene” includes any level of inhibition of an RPS25 gene, e.g., at least partial suppression of the expression of an RPS25 gene, such as an inhibition by at least 20%. In certain embodiments, inhibition is by at least 30%, at least 40%, preferably at least 50%, at least about 60%, at least 70%, at least about 80%, at least 85%, at least 90%, at least 95%, at least 96%, at least 97%, at least 98%, or at least 99%; or to below the level of detection of the assay method.

[0705] The expression of an RPS25 gene may be assessed based on the level of any variable associated with RPS25 gene expression, e.g., RPS25 mRNA level or RPS25 protein level, or, for example, the level of C9orf72 expanded protein.

[0706] Inhibition may be assessed by a decrease in an absolute or relative level of one or more of these variables compared with a control level. The control level may be any type of control level that is utilized in the art, e.g., a pre-dose baseline level, or a level determined from a similar subject, cell, or sample that is untreated or treated with a control (such as, e.g., buffer only control or inactive agent control).

[0707] In some embodiments of the methods of the disclosure, expression of an RPS25 gene is inhibited by at least 20%, 30%, 40%, preferably at least 50%, 60%, 70%, 80%, 85%, 90%, or 95%, or to below the level of detection of the assay. In certain embodiments, the methods include a clinically relevant inhibition of expression of RPS25, e.g. as demonstrated by a clinically relevant outcome after treatment of a subject with an agent to reduce the expression of RPS25.

[0708] Inhibition of the expression of an RPS25 gene may be manifested by a reduction of the amount of mRNA expressed by a first cell or group of cells (such cells may be present, for example, in a sample derived from a subject) in which an RPS25 gene is transcribed and which has or have been treated (e.g., by contacting the cell or cells with a RNAi agent of the disclosure, or by administering a RNAi agent of the disclosure to a subject in which the cells are or were present) such that the expression of an RPS25 gene is inhibited, as compared to a second cell or group of cells substantially identical to the first cell or group of cells but which has not or have not been so treated (control cell(s) not treated with a RNAi agent or not treated with a RNAi agent targeted to the gene of interest). The degree of inhibition may be expressed in terms of:

$$\frac{( mRNA in control cells ) - ( mRNA in treated cells )}{( mRNA in control cells )} \cdot 100 \%$$

[0709] In other embodiments, inhibition of the expression of an RPS25 gene may be assessed in terms of a reduction of a parameter that is functionally linked to an RPS25 gene expression, e.g., RPS25 protein expression. RPS25 gene silencing may be determined in any cell expressing RPS25, either endogenous or heterologous from an expression construct, and by any assay known in the art.

[0710] Inhibition of the expression of an RPS25 protein may be manifested by a reduction in the level of the RPS25 protein that is expressed by a cell or group of cells (e.g., the level of protein expressed in a sample derived from a subject). As explained above, for the assessment of mRNA suppression, the inhibition of protein expression levels in a treated cell or group of cells may similarly be expressed as a percentage of the level of protein in a control cell or group of cells.

[0711] A control cell or group of cells that may be used to assess the inhibition of the expression of an RPS25 gene includes a cell or group of cells that has not yet been contacted with an RNAi agent of the disclosure. For example, the control cell or group of cells may be derived from an individual subject (e.g., a human or animal subject) prior to treatment of the subject with an RNAi agent.

[0712] The level of RPS25 mRNA that is expressed by a cell or group of cells may be determined using any method known in the art for assessing mRNA expression. In one embodiment, the level of expression of RPS25 in a sample is determined by detecting a transcribed polynucleotide, or portion thereof, e.g., mRNA of the RPS25 gene. RNA may be extracted from cells using RNA extraction techniques including, for example, using acid phenol/guanidine isothiocyanate extraction (RNAzol B; Biogenesis), RNeasy™ RNA preparation kits (Qiagen®) or PAXgene (PreAnalytix, Switzerland). Typical assay formats utilizing ribonucleic acid hybridization include nuclear run-on assays, RT-PCR, RNase protection assays, northern blotting, in situ hybridization, and microarray analysis. Circulating RPS25 mRNA may be detected using methods the described in WO2012/177906, the entire contents of which are hereby incorporated herein by reference.

[0713] In some embodiments, the level of expression of RPS25 is determined using a nucleic acid probe. The term “probe”, as used herein, refers to any molecule that is capable of selectively binding to a specific RPS25 nucleic acid or protein, or fragment thereof. Probes can be synthesized by one of skill in the art, or derived from appropriate biological preparations. Probes may be specifically designed to be labeled. Examples of molecules that can be utilized as probes include, but are not limited to, RNA, DNA, proteins, antibodies, and organic molecules.

[0714] Isolated mRNA can be used in hybridization or amplification assays that include, but are not limited to, Southern or northern analyses, polymerase chain reaction (PCR) analyses and probe arrays. One method for the determination of mRNA levels involves contacting the isolated mRNA with a nucleic acid molecule (probe) that can hybridize to RPS25 mRNA. In one embodiment, the mRNA is immobilized on a solid surface and contacted with a probe, for example by running the isolated mRNA on an agarose gel and transferring the mRNA from the gel to a membrane, such as nitrocellulose. In an alternative embodiment, the probe(s) are immobilized on a solid surface and the mRNA is contacted with the probe(s), for example, in an Affymetrix® gene chip array. A skilled artisan can readily adapt known mRNA detection methods for use in determining the level of RPS25 mRNA.

[0715] An alternative method for determining the level of expression of RPS25 in a sample involves the process of nucleic acid amplification or reverse transcriptase (to prepare cDNA) of for example mRNA in the sample, e.g., by RT-PCR (the experimental embodiment set forth in Mullis, 1987, U.S. Pat. No. 4,683,202), ligase chain reaction (Barany (1991) Proc. Natl. Acad. Sci. USA 88:189-193), self sustained sequence replication (Guatelli et al. (1990) Proc. Natl. Acad. Sci. USA 87:1874-1878), transcriptional amplification system (Kwoh et al. (1989) Proc. Natl. Acad. Sci. USA 86:1173-1177), Q-Beta Replicase (Lizardi et al. (1988) Bio/Technology 6:1197), rolling circle replication (Lizardi et al., U.S. Pat. No. 5,854,033) or any other nucleic acid amplification method, followed by the detection of the amplified molecules using techniques well known to those of skill in the art. These detection schemes are especially useful for the detection of nucleic acid molecules if such molecules are present in very low numbers. In particular aspects of the disclosure, the level of expression of RPS25 is determined by quantitative fluorogenic RT-PCR (i.e., the TaqMan™ System), by a Dual-Glo® Luciferase assay, or by other art-recognized method for measurement of RPS25 expression or mRNA level.

[0716] The expression level of RPS25 mRNA may be monitored using a membrane blot (such as used in hybridization analysis such as northern, Southern, dot, and the like), or microwells, sample tubes, gels, beads or fibers (or any solid support comprising bound nucleic acids). See U.S. Pat. Nos. 5,770,722, 5,874,219, 5,744,305, 5,677,195 and 5,445,934, which are incorporated herein by reference. The determination of RPS25 expression level may also comprise using nucleic acid probes in solution.

[0717] In some embodiments, the level of mRNA expression is assessed using branched DNA (bDNA) assays or real time PCR (qPCR). The use of this PCR method is described and exemplified in the Examples presented herein. Such methods can also be used for the detection of RPS25 nucleic acids.

[0718] The level of RPS25 protein expression may be determined using any method known in the art for the measurement of protein levels. Such methods include, for example, electrophoresis, capillary electrophoresis, high performance liquid chromatography (HPLC), thin layer chromatography (TLC), hyperdiffusion chromatography, fluid or gel precipitin reactions, absorption spectroscopy, a colorimetric assays, spectrophotometric assays, flow cytometry, immunodiffusion (single or double), immunoelectrophoresis, western blotting, radioimmunoassay (RIA), enzyme-linked immunosorbent assays (ELISAs), immunofluorescent assays, electrochemiluminescence assays, and the like. Such assays can also be used for the detection of proteins indicative of the presence or replication of RPS25 proteins.

[0719] In some embodiments, the efficacy of the methods of the disclosure in the treatment of an RPS25-related disease is assessed by a decrease in RPS25 mRNA level (e.g, by assessment of a CSF sample for RPS25 level, by brain biopsy, or otherwise).

[0720] In some embodiments of the methods of the disclosure, the RNAi agent is administered to a subject such that the RNAi agent is delivered to a specific site within the subject. The inhibition of expression of RPS25 may be assessed using measurements of the level or change in the level of RPS25 mRNA or RPS25 protein in a sample derived from a specific site within the subject, e.g., CNS cells. In certain embodiments, the methods include a clinically relevant inhibition of expression of RPS25, e.g. as demonstrated by a clinically relevant outcome after treatment of a subject with an agent to reduce the expression of RPS25.

[0721] As used herein, the terms detecting or determining a level of an analyte are understood to mean performing the steps to determine if a material, e.g., protein, RNA, is present. As used herein, methods of detecting or determining include detection or determination of an analyte level that is below the level of detection for the method used.

### X. Methods of Treating or Preventing RPS25-Associated Diseases

[0722] The present disclosure also provides methods of using a RNAi agent of the disclosure or a composition containing a RNAi agent of the disclosure to reduce or inhibit RPS25 expression in a cell. The methods include contacting the cell with a dsRNA of the disclosure and maintaining the cell for a time sufficient to obtain degradation of the mRNA transcript of an RPS25 gene, thereby inhibiting expression of the RPS25 gene in the cell. Reduction in gene expression can be assessed by any methods known in the art. For example, a reduction in the expression of RPS25 may be determined by determining the mRNA expression level of RPS25 using methods routine to one of ordinary skill in the art, e.g., northern blotting, qRT-PCR; by determining the protein level of RPS25 using methods routine to one of ordinary skill in the art, such as western blotting, immunological techniques.

[0723] In the methods of the disclosure the cell may be contacted in vitro or in vivo, i.e., the cell may be within a subject.

[0724] A cell suitable for treatment using the methods of the disclosure may be any cell that expresses an RPS25 gene. A cell suitable for use in the methods of the disclosure may be a mammalian cell, e.g., a primate cell (such as a human cell or a non-human primate cell, e.g., a monkey cell or a chimpanzee cell), a non-primate cell (such as a rat cell, or a mouse cell. In one embodiment, the cell is a human cell, e.g., a human CNS cell.

[0725] RPS25 expression is inhibited in the cell by at least about 30, 40, 50, 55, 60, 65, 70, 75, 80, 85, 90, 95, 96, 97, 98, 99, or about 100%, i.e., to below the level of detection. In preferred embodiments, RPS25 expression is inhibited by at least 50%.

[0726] The in vivo methods of the disclosure may include administering to a subject a composition containing a RNAi agent, where the RNAi agent includes a nucleotide sequence that is complementary to at least a part of an RNA transcript of the RPS25 gene of the mammal to be treated. When the organism to be treated is a mammal such as a human, the composition can be administered by any means known in the art including, but not limited to oral, intraperitoneal, or parenteral routes, including intracranial (e.g., intraventricular, intraparenchymal, and intrathecal), intravenous, intramuscular, intravitreal, subcutaneous, transdermal, airway (aerosol), nasal, rectal, and topical (including buccal and sublingual) administration. In certain embodiments, the compositions are administered by intravenous infusion or injection. In certain embodiments, the compositions are administered by subcutaneous injection. In certain embodiments, the compositions are administered by intrathecal injection.

[0727] In some embodiments, the administration is via a depot injection. A depot injection may release the RNAi agent in a consistent way over a prolonged time period. Thus, a depot injection may reduce the frequency of dosing needed to obtain a desired effect, e.g., a desired inhibition of RPS25, or a therapeutic or prophylactic effect. A depot injection may also provide more consistent serum concentrations. Depot injections may include subcutaneous injections or intramuscular injections. In preferred embodiments, the depot injection is a subcutaneous injection.

[0728] In some embodiments, the administration is via a pump. The pump may be an external pump or a surgically implanted pump. In certain embodiments, the pump is a subcutaneously implanted osmotic pump. In other embodiments, the pump is an infusion pump. An infusion pump may be used for intracranial, intravenous, subcutaneous, arterial, or epidural infusions. In preferred embodiments, the infusion pump is a subcutaneous infusion pump. In other embodiments, the pump is a surgically implanted pump that delivers the RNAi agent to the CNS.

[0729] The mode of administration may be chosen based upon whether local or systemic treatment is desired and based upon the area to be treated. The route and site of administration may be chosen to enhance targeting.

[0730] In one aspect, the present disclosure also provides methods for inhibiting the expression of an RPS25 gene in a mammal. The methods include administering to the mammal a composition comprising a dsRNA that targets an RPS25 gene in a cell of the mammal and maintaining the mammal for a time sufficient to obtain degradation of the mRNA transcript of the RPS25 gene, thereby inhibiting expression of the RPS25 gene in the cell. Reduction in gene expression can be assessed by any methods known it the art and by methods, e.g. qRT-PCR, described herein. Reduction in protein production can be assessed by any methods known it the art and by methods, e.g. ELISA, described herein. In one embodiment, a CNS biopsy sample or a cerebrospinal fluid (CSF) sample serves as the tissue material for monitoring the reduction in RPS25 gene or protein expression (or of a proxy therefore).

[0731] The present disclosure further provides methods of treatment of a subject in need thereof. The treatment methods of the disclosure include administering an RNAi agent of the disclosure to a subject, e.g., a subject that would benefit from inhibition of RPS25 expression, in a therapeutically effective amount of a RNAi agent targeting an RPS25 gene or a pharmaceutical composition comprising a RNAi agent targeting aRPS25 gene.

[0732] In addition, the present disclosure provides methods of preventing, treating or inhibiting the progression of an RPS25-associated disease or disorder (e.g., nucleotide repeat expansion diseases, such as C9orf72 ALS/FTD, Huntington-Like Syndrome Due To C9orf72 Expansions, Fragile X syndrome (FXS), Myotonic dystrophy (i.e., DM1, and DM2), CAG/polyglutamine disease (e.g., Huntington's disease, Spinal and bulbar muscular atrophy (SBMA), Dentatorubral-pallidoluysian atrophy, Spinocerebellar ataxia type I, Spinocerebellar ataxia type 2, Spinocerebellar ataxia type 3, Spinocerebellar ataxia type 6, Spinocerebellar ataxia type 7, Spinocerebellar ataxia type 8, Spinocerebellar ataxia type 12, and Spinocerebellar ataxia type 17), Friedreich ataxia, Unverricht-Lundborg myoclonic epilepsy (EPM1), Oculopharyngeal muscular dystrophy (OPMD), and Fuchs endothelial corneal dystrophy (FECD)) in a subject, such as the progression of an RPS25-associated disease or disorder. The methods include administering to the subject a therapeutically effective amount of any of the RNAi agent, e.g., dsRNA agents, or the pharmaceutical composition provided herein, thereby preventing, treating or inhibiting the progression of an RPS25-associated disease or disorder in the subject.

[0733] An RNAi agent of the disclosure may be administered as a “free RNAi agent.” A free RNAi agent is administered in the absence of a pharmaceutical composition. The naked RNAi agent may be in a suitable buffer solution. The buffer solution may comprise acetate, citrate, prolamine, carbonate, or phosphate, or any combination thereof. In one embodiment, the buffer solution is phosphate buffered saline (PBS). The pH and osmolarity of the buffer solution containing the RNAi agent can be adjusted such that it is suitable for administering to a subject.

[0734] Alternatively, an RNAi agent of the disclosure may be administered as a pharmaceutical composition, such as a dsRNA liposomal formulation.

[0735] Subjects that would benefit from a reduction or inhibition of RPS25 gene expression are those having an RPS25-associated disease.

[0736] The disclosure further provides methods for the use of a RNAi agent or a pharmaceutical composition thereof, e.g., for treating a subject that would benefit from reduction or inhibition of RPS25 expression, e.g., a subject having an RPS25-associated disorder, in combination with other pharmaceuticals or other therapeutic methods, e.g., with known pharmaceuticals or known therapeutic methods, such as, for example, those which are currently employed for treating these disorders. For example, in certain embodiments, an RNAi agent targeting RPS25 is administered in combination with, e.g., an agent useful in treating an RPS25-associated disorder as described elsewhere herein or as otherwise known in the art. For example, additional agents suitable for treating a subject that would benefit from reduction in RPS25 expression, e.g., a subject having an RPS25-associated disorder, may include agents currently used to treat symptoms of RPS25. The RNAi agent and additional therapeutic agents may be administered at the same time or in the same combination, e.g., intrathecally, or the additional therapeutic agent can be administered as part of a separate composition or at separate times or by another method known in the art or described herein.

[0737] In one embodiment, the method includes administering a composition featured herein such that expression of the target RPS25 gene is decreased, for at least one month. In preferred embodiments, expression is decreased for at least 2 months, 3 months, or 6 months.

[0738] Preferably, the RNAi agents useful for the methods and compositions featured herein specifically target RNAs (primary or processed) of the target RPS25 gene. Compositions and methods for inhibiting the expression of these genes using RNAi agents can be prepared and performed as described herein.

[0739] Administration of the dsRNA according to the methods of the disclosure may result in a reduction of the severity, signs, symptoms, or markers of such diseases or disorders in a patient with an RPS25-associated disorder. By “reduction” in this context is meant a statistically significant or clinically significant decrease in such level. The reduction can be, for example, at least 5%, 10%, 15%, 20%, 25%, 30%, 35%, 40%, 45%, 50%, 55%, 60%, 65%, 70%, 75%, 80%, 85%, 90%, 95%, or about 100%.

[0740] Efficacy of treatment or prevention of disease can be assessed, for example by measuring disease progression, disease remission, symptom severity, reduction in pain, quality of life, dose of a medication required to sustain a treatment effect, level of a disease marker or any other measurable parameter appropriate for a given disease being treated or targeted for prevention. It is well within the ability of one skilled in the art to monitor efficacy of treatment or prevention by measuring any one of such parameters, or any combination of parameters. For example, efficacy of treatment of an RPS25-associated disorder may be assessed, for example, by periodic monitoring of a subject's. Comparisons of the later readings with the initial readings provide a physician an indication of whether the treatment is effective. It is well within the ability of one skilled in the art to monitor efficacy of treatment or prevention by measuring any one of such parameters, or any combination of parameters. In connection with the administration of a RNAi agent targeting RPS25 or pharmaceutical composition thereof, “effective against” an RPS25-associated disorder indicates that administration in a clinically appropriate manner results in a beneficial effect for at least a statistically significant fraction of patients, such as an improvement of symptoms, a cure, a reduction in disease, extension of life, improvement in quality of life, or other effect generally recognized as positive by medical doctors familiar with treating RPS25-associated disorders and the related causes.

[0741] A treatment or preventive effect is evident when there is a statistically significant improvement in one or more parameters of disease status, or by a failure to worsen or to develop symptoms where they would otherwise be anticipated. As an example, a favorable change of at least 10% in a measurable parameter of disease, and preferably at least 20%, 30%, 40%, 50% or more can be indicative of effective treatment. Efficacy for a given RNAi agent drug or formulation of that drug can also be judged using an experimental animal model for the given disease as known in the art. When using an experimental animal model, efficacy of treatment is evidenced when a statistically significant reduction in a marker or symptom is observed.

[0742] Alternatively, the efficacy can be measured by a reduction in the severity of disease as determined by one skilled in the art of diagnosis based on a clinically accepted disease severity grading scale. Any positive change resulting in e.g., lessening of severity of disease measured using the appropriate scale, represents adequate treatment using a RNAi agent or RNAi agent formulation as described herein.

[0743] Subjects can be administered a therapeutic amount of dsRNA, such as about 0.01 mg/kg to about 200 mg/kg.

[0744] The RNAi agent can be administered intrathecally, via intravitreal injection, or by intravenous infusion over a period of time, on a regular basis. In certain embodiments, after an initial treatment regimen, the treatments can be administered on a less frequent basis. Administration of the RNAi agent can reduce RPS25 levels, e.g., in a cell, tissue, blood, CSF sample or other compartment of the patient by at least 20%, 30%, 40%, 50%, 55%, 60%, 65%, 70,% 75%, 80%, 85%, 90%, 95%, 96%, 97%, 98%, or at least about 99% or more. In a preferred embodiment, administration of the RNAi agent can reduce RPS25 levels, e.g., in a cell, tissue, blood, CSF sample or other compartment of the patient by at least 50%.

[0745] Before administration of a full dose of the RNAi agent, patients can be administered a smaller dose, such as a 5% infusion reaction, and monitored for adverse effects, such as an allergic reaction. In another example, the patient can be monitored for unwanted immunostimulatory effects, such as increased cytokine (e.g., TNF-alpha or INF-alpha) levels.

[0746] Alternatively, the RNAi agent can be administered subcutaneously, i.e., by subcutaneous injection. One or more injections may be used to deliver the desired, e.g., monthly dose of RNAi agent to a subject. The injections may be repeated over a period of time. The administration may be repeated on a regular basis. In certain embodiments, after an initial treatment regimen, the treatments can be administered on a less frequent basis. A repeat-dose regimen may include administration of a therapeutic amount of RNAi agent on a regular basis, such as monthly or extending to once a quarter, twice per year, once per year. In certain embodiments, the RNAi agent is administered about once per month to about once per quarter (i.e., about once every three months).

[0747] Unless otherwise defined, all technical and scientific terms used herein have the same meaning as commonly understood by one of ordinary skill in the art to which this invention belongs. Although methods and materials similar or equivalent to those described herein can be used in the practice or testing of the RNAi agents and methods featured in the invention, suitable methods and materials are described below. All publications, patent applications, patents, and other references mentioned herein are incorporated by reference in their entirety. In case of conflict, the present specification, including definitions, will control. In addition, the materials, methods, and examples are illustrative only and not intended to be limiting.

[0748] An informal Sequence Listing is filed herewith and forms part of the specification as filed.

### EXAMPLES

### Example 1. RNAi Agent Design, Synthesis, Selection, and In Vitro Evaluation

[0749] This Example describes methods for the design, synthesis, selection, and in vitro evaluation of RPS25 RNAi agents.

### Source of Reagents

[0750] Where the source of a reagent is not specifically given herein, such reagent can be obtained from any supplier of reagents for molecular biology at a quality/purity standard for application in molecular biology.

### Bioinformatics

[0751] A set of siRNAs targeting the human small ribosomal protein subunit 25 (RPS25; human NCBI refseqID NM_001028.3; NCBI GeneID: 6230) was designed using custom R and Python scripts. The human NM_001028 REFSEQ mRNA, version 3, has a length of 483 bases.

[0752] RPS25 single strands and duplexes were made using routine methods known in the art. A detailed list of the unmodified RPS25 sense and antisense strand sequences is shown in Tables 2, 4, 6, 8, 10 and 13 and a detailed list of the modified RPS25 sense and antisense strand sequences is shown in Tables 3, 5, 7, 9, 11, 12 and 14.

### In Vitro Dual-Luciferase and Endogenous Screening Assays

[0753] Dual-Glo® Luciferase Assay

[0754] Cos-7 cells (ATCC, Manassas, Va.) are grown to near confluence at 37° C. in an atmosphere of 5% CO₂ in DMEM (ATCC) supplemented with 10% FBS, before being released from the plate by trypsinization. Multi-dose experiments are performed at 10 nM and 0.1 nM. siRNA and psiCHECK2-RPS25 (GenBank Accession No. NM_001028.3) plasmid transfections are carried out with a plasmid containing the 3′ untranslated region (UTR). Transfection is carried out by adding 5 μL of siRNA duplexes and 5 μL (5 ng) of psiCHECK2 plasmid per well along with 4.9 μL of Opti-MEM plus 0.1 μL of Lipofectamine 2000 per well (Invitrogen, Carlsbad Calif. cat #13778-150) and then incubated at room temperature for 15 minutes. The mixture is then added to the cells which are re-suspended in 35 μL of fresh complete media. The transfected cells are incubated at 37° C. in an atmosphere of 5% CO₂.

[0755] Forty-eight hours after the siRNAs and psiCHECK2 plasmid are transfected; Firefly (transfection control) and Renilla (fused to RPS25 target sequence) luciferase are measured. First, media is removed from cells. Then Firefly luciferase activity is measured by adding 20 μL of Dual-Glo® Luciferase Reagent equal to the culture medium volume to each well and mix. The mixture is incubated at room temperature for 30 minutes before luminescence (500 nm) is measured on a Spectramax (Molecular Devices) to detect the Firefly luciferase signal. Renilla luciferase activity is measured by adding 20 μL of room temperature of Dual-Glo® Stop & Glo® Reagent is added to each well and the plates are incubated for 10-15 minutes before luminescence is again measured to determine the Renilla luciferase signal. The Dual-Glo® Stop & Glo® Reagent quenches the firefly luciferase signal and sustained luminescence for the Renilla luciferase reaction. siRNA activity is determined by normalizing the Renilla (RPS25) signal to the Firefly (control) signal within each well. The magnitude of siRNA activity is then assessed relative to cells that were transfected with the same vector but were not treated with siRNA or were treated with a non-targeting siRNA. All transfections are done with n=4.

[0756] Cell Culture and Transfections

[0757] Cells are transfected by adding 4.9 μL of Opti-MEM plus 0.1 μL of RNAiMAX per well (Invitrogen, Carlsbad Calif. cat #13778-150) to 5 μL of siRNA duplexes per well, with 4 replicates of each siRNA duplex, into a 384-well plate, and incubated at room temperature for 15 minutes. Forty μL of MEDIA containing ˜5×10³ cells are then added to the siRNA mixture. Cells are incubated for 24 hours prior to RNA purification. Experiments are performed at 10 nM and 0.1 nM. Transfection experiments are performed in human hepatoma Hep3B cells (ATCC HB-8064) with EMEM (ATCC catalog no. 30-2003), human neuroblastoma BE(2)-C cells (ATCC CRL-2268) with EMEM:F12 media (Gibco catalog no. 11765054) and mouse neuroblastoma Neuro2A cells (ATCC CCL-131) with EMEM media.

[0758] For HeLa cells, cells were transfected by adding 3 μL of Opti-MEM plus 0.1 μL of RNAiMAX per well (Invitrogen, Carlsbad Calif. cat #13778-150) to 5 μL of siRNA duplexes per well, with 4 replicates of each siRNA duplex, into a 96-well plate, and incubated at room temperature for 15 minutes. Forty μL of MEDIA containing ˜1.5×10⁴ cells were then added to the siRNA mixture. Cells were incubated for 24 hours prior to RNA purification. Experiments are performed at 10 nM. Transfection experiments are performed in HeLa cells.

[0759] Total RNA Isolation Using DYNABEADS mRNA Isolation Kit

[0760] RNA was isolated using an automated protocol on a BioTek-EL406 platform using DYNABEADs (Invitrogen, cat #61012). Briefly, 70 μL of Lysis/Binding Buffer and 10 μL of lysis buffer containing 3 μL of magnetic beads were added to the plate with cells. Plates were incubated on an electromagnetic shaker for 10 minutes at room temperature and then magnetic beads were captured and the supernatant was removed. Bead-bound RNA was then washed 2 times with 150 μL Wash Buffer A and once with Wash Buffer B. Beads were then washed with 150 μL Elution Buffer, re-captured and supernatant removed.

[0761] cDNA Synthesis Using ABI High Capacity cDNA Reverse Transcription Kit (Applied Biosystems, Foster City, Calif., Cat #4368813)

[0762] Ten μL of a master mix containing 1 μL 10× Buffer, 0.4 μL 25× dNTPs, 1 μL 10× Random primers, 0.5 μL Reverse Transcriptase, 0.5 μL RNase inhibitor and 6.6 μL of H₂O per reaction were added to RNA isolated above. Plates were sealed, mixed, and incubated on an electromagnetic shaker for 10 minutes at room temperature, followed by 2 hour incubation at 37° C.

[0763] Real Time PCR

[0764] Two μL of cDNA were added to a master mix containing 0.5 μL of human or mouse GAPDH TaqMan Probe (ThermoFisher cat 4352934E or 4351309) and 0.5 μL of appropriate RPS25 probe (commercially available, e.g., from Thermo Fisher) and 5 μL Lightcycler 480 probe master mix (Roche Cat #04887301001) per well in a 384 well plates (Roche cat #04887301001). Real time PCR was done in a LightCycler480 Real Time PCR system (Roche). Each duplex was tested with N=4 and data were normalized to cells transfected with a non-targeting control siRNA. To calculate relative fold change, real time data were analyzed using the ΔΔCt method and normalized to assays performed with cells transfected with a non-targeting control siRNA. The results of the screening of the dsRNA agents listed in Table 12 at 10 nM in HeLa cells are shown in Table 15.

TABLE 1
Abbreviations of nucleotide monomers used in nucleic acid sequence representation. It will
be understood that these monomers, when present in an oligonucleotide, are mutually linked by 5′-3′-
phosphodiester bonds.

| Abbreviation | Nucleotide(s) |
|---|---|
| A | Adenosine-3′-phosphate |
| Ab | beta-L-adenosine-3-phosphate |
| Abs | beta-L-adenosine-3'-phosphorothioate |
| Af | 2′-fluoroadenosine-3′-phosphate |
| Afs | 2′-fluoroadenosine-3′-phosphorothioate |
| As | adenosine-3′-phosphorothioate |
| C | cytidine-3′-phosphate |
| Cb | beta-L-cytidine-3-phosphate |
| Cbs | beta-L-cytidine-3'-phosphorothioate |
| Cf | 2′-fluorocytidine-3′-phosphate |
| Cfs | 2′-fluorocytidine-3′-phosphorothioate |
| Cs | cytidine-3′-phosphorothioate |
| G | guanosine-3′-phosphate |
| Gb | beta-L-guanosine-3'-phosphate |
| Gbs | beta-L-guanosine-3'-phosphorothioate |
| Gf | 2′-fluoroguanosine-3′-phosphate |
| Gfs | 2′-fluoroguanosine-3′-phosphorothioate |
| Gs | guanosine-3′-phosphorothioate |
| T | 5′-methyluridine-3′-phosphate |
| Tf | 2′-fluoro-5-methyluridine-3′-phosphate |
| Tfs | 2‘-fluoro-5-methyluridine-3‘-phosphorothioate |
| Ts | 5-methyluridine-3′-phosphorothioate |
| U | Uridine-3′-phosphate |
| Uf | 2′-fluorouridine-3′-phosphate |
| Ufs | 2′-fluorouridine-3′-phosphorothioate |
| Us | uridine-3′-phosphorothioate |
| N | anynucleotide,modifiedorunmodified |
| a | 2'-O-methyladenosine-3′-phosphate |
| as | 2'-O-methyladenosine-3′-phosphorothioate |
| c | 2'-O-methylcytidine-3′-phosphate |
| cs | 2'-O-methylcytidine-3′-phosphorothioate |
| g | 2'-O-methylguanosine-3′-phosphate |
| gs | 2'-O-methylguanosine-3′-phosphorothioate |
| t | 2′-0-methyl-5-methyluridine-3′-phosphate |
| ts | 2′-0-methyl-5-methyluridine-3′-phosphorothioate |
| u | 2'-O-methyluridine-3′-phosphate |
| us | 2'-O-methyluridine-3′-phosphorothioate |
| s | phosphorothioatelinkage |
| L96 | N-[tris(GalNAc-alkyl)-amidodecanoyl)]-4-hydroxyprolinol |
| | Hyp-(GalNAc-alkyl)3 |
| Y34 | 2-hydroxymethyl-tetrahydrofurane-4-methoxy-3-phosphate(abasic2'-0Me |
| | furanose) |
| Y44 | invertedabasicDNA(2-hydroxymethyl-tetrahydrofurane-5-phosphate) |
| (Agn) | Adenosine-glycolnucleicacid(GNA) |
| L10 | N-(cholesterylcarboxamidocaproyl)-4-hydroxyprolinol(Hyp-C6-Chol) |
| (Cen) | Cytidine-glycolnucleicacid(GNA) |
| (Ggn) | Guanosine-glycolnucleicacid(GNA) |
| (Tz) | Thymidine-glycolnucleicacid(GNA)S-Isomer |
| P | Phosphate |
| VP | Vinyl-phosphonate |
| (Aam) | 2'-O-(N-methylacetamide)adenosine-3'-phosphate |
| (Aams) | 2'-O-(N-methylacetamide)adenosine-3'-phosphorothioate |
| (Gam) | 2'-O-(N-methylacetamide)guanosine-3'-phosphate |
| (Gams) | 2'-O-(N-methylacetamide)guanosine-3'-phosphorothioate |
| (Tam) | 2'-O-(N-methylacetamide)thymidine-3'-phosphate |
| (Tams) | 2'-O-(N-methylacetamide)thymidine-3'-phosphorothioate |
| dA | 2'-deoxyadenosine-3‘-phosphate |
| dAs | 2'-deoxyadenosine-3‘-phosphorothioate |
| dC | 2'-deoxycytidine-3-phosphate |
| dCs | 2'-deoxycytidine-3-phosphorothioate |
| dG | 2'-deoxyguanosine-3'-phosphate |
| dGs | 2'-deoxyguanosine-3'-phosphorothioate |
| dT | 2'-deoxythymidine-3'-phosphate |
| dTs | 2'-deoxythymidine-3'-phosphorothioate |
| dU | 2'-deoxyuridine |
| dUs | 2'-deoxyuridine-3'-phosphorothioate |
| (Aeo) | 2'-O-methoxyethyladenosine-3'-phosphate |
| (Aeos) | 2'-O-methoxyethyladenosine-3'-phosphorothioate |
| (Geo) | 2'-O-methoxyethylguanosine-3'-phosphate |
| (Geos) | 2'-O-methoxyethylguanosine-3'-phosphorothioate |
| (Teo) | 2'-O-methoxyethyl-5-methyluridine-3'-phosphate |
| (Teos) | 2'-O-methoxyethyl-5-methyluridine-3'-phosphorothioate |
| (m5Ceo) | 2'-O-methoxyethyl-5-methylcytidine-3'-phosphate |
| (m5Ceos) | 2'-O-methoxyethyl-5-methylcytidine-3'-phosphorothioate |
| (A3m) | 3'-O-methyladenosine-2'-phosphate |
| (A3mx) | 3'-O-methyl-xylofuranosyladenosine-2'-phosphate |
| (G3m) | 3'-O-methylguanosine-2'-phosphate |
| (G3mx) | 3'-O-methyl-xylofuranosylguanosine-2'-phosphate |
| (C3m) | 3'-O-methylcytidine-2'-phosphate |
| (C3mx) | 3'-O-methyl-xylofuranosylcytidine-2'-phosphate |
| (U3m) | 3'-0-methyluridine-2'-phosphate |
| U3mx) | 3'-O-methyl-xylofuranosyluridine-2'-phosphate |
| (m5Cam) | 2'-O-(N-methylacetamide)-5-methylcytidine-3'-phosphate |
| (m5Cams) | 2'-O-(N-methylacetamide)-5-methylcytidine-3'-phosphorothioate |
| (Chd) | 2′-O-hexadecyl-cytidine-3′-phosphate |
| (Chds) | 2′-O-hexadecyl-cytidine-3′-phosphorothioate |
| (Uhd) | 2′-O-hexadecyl-uridine-3′-phosphate |
| (Uhds) | 2′-O-hexadecyl-uridine-3′-phosphorothioate |
| (pshe) | Hydroxyethylphosphorothioate |
| (Chd) | 2′-O-hexadecyl-cytidine-3′-phosphate |
| (Ahd) | 2′-O-hexadecyl-adenosine-3′-phosphate |
| (Ghd) | 2′-O-hexadecyl-guanosine-3′-phosphate |
| (Uhd) | 2′-O-hexadecyl-uridine-3′-phosphate |
| (C2p) | cytidine-2'-phosphate |
| (G2p) | guanosine-2'-phosphate |
| (U2p) | uridine-2'-phosphate |
| Abbreviation | Nucleotide(s) |
| (A2p) | adenosine-2'-phosphate |

TABLE 2
RPS25 Unmodified Sequences

| | | | | | | | NM_00 |
|---|---|---|---|---|---|---|---|
| | Sense | SEQ | Sense | Antisense | SEQ | Antisense | 1028.3 |
| Duplex | Sequence | ID | Oligo | Sequence | ID | Oligo | Target |
| ID | 5′ to 3′ | NO: | Name | 5′ to 3′ | NO: | Name | Site |
| AD- | CUUUUUGUCC | 23 | NM_ | AAAGAUGUCG | 433 | NM_ | 1-19 |
| 960501 | GACAUCUUU | | 001028.3_1- | GACAAAAAG | | 001028.3_1- | |
| | | | 19_G19U_s | | | 19_C1A_as | |
| AD- | UUUUUGUCCG | 24 | NM_ | ACAAGAUGUC | 434 | NM_ | 2-20 |
| 960502 | ACAUCUUGU | | 001028.3_2- | GGACAAAAA | | 001028.3_2- | |
| | | | 20_A19U_s | | | 20_U1A_as | |
| AD- | UUUUGUCCGA | 25 | NM_ | AUCAAGAUGU | 435 | NM_ | 3-21 |
| 960503 | CAUCUUGAU | | 001028.3_3- | CGGACAAAA | | 001028.3_3- | |
| | | | 21_C19U_s | | | 21_G1A_as | |
| AD- | UUUGUCCGAC | 26 | NM_ | AGUCAAGAUG | 436 | NM_ | 4-22 |
| 960504 | AUCUUGACU | | 001028.3_4- | UCGGACAAA | | 001028.3_4- | |
| | | | 22_G19U_s | | | 22_C1A_as | |
| AD- | UUGUCCGACA | 27 | NM_ | ACGUCAAGAU | 437 | NM_ | 5-23 |
| 960505 | UCUUGACGU | | 001028.3_5- | GUCGGACAA | | 001028.3_5- | |
| | | | 23_A19U_s | | | 23_U1A_as | |
| AD- | UGUCCGACAU | 28 | NM_ | AUCGUCAAGA | 438 | NM_ | 6-24 |
| 960506 | CUUGACGAU | | 001028.3_6- | UGUCGGACA | | 001028.3_6- | |
| | | | 24_G19U_s | | | 24_C1A_as | |
| AD- | GUCCGACAUC | 29 | NM_ | ACUCGUCAAG | 439 | NM_ | 7-25 |
| 960507 | UUGACGAGU | | 001028.3_7- | AUGUCGGAC | | 001028.3_7- | |
| | | | 25_G19U_s | | | 25_C1A_as | |
| AD- | UCCGACAUCU | 30 | NM_ | ACCUCGUCAA | 440 | NM_ | 8-26 |
| 960508 | UGACGAGGU | | 001028.3_8- | GAUGUCGGA | | 001028.3_8- | |
| | | | 26_C19U_s | | | 26_G1A_as | |
| AD- | CCGACAUCUU | 31 | NM_ | AGCCUCGUCA | 441 | NM_ | 9-27 |
| 960509 | GACGAGGCU | | 001028.3_9- | AGAUGUCGG | | 001028.3_9- | |
| | | | 27_s | | | 27_as | |
| AD- | CGACAUCUUG | 32 | NM_ | AAGCCUCGUC | 442 | NM_ | 10-28 |
| 960510 | ACGAGGCUU | | 001028.3_10- | AAGAUGUCG | | 001028.3_10- | |
| | | | 28_G19U_s | | | 28_C1A_as | |
| AD- | GACAUCUUGA | 33 | NM_ | ACAGCCUCGU | 443 | NM_ | 11-29 |
| 960511 | CGAGGCUGU | | 001028.3_11- | CAAGAUGUC | | 001028.3_11- | |
| | | | 29_C19U_s | | | 29_G1A_as | |
| AD- | ACAUCUUGAC | 34 | NM_ | AGCAGCCUCG | 444 | NM_ | 12-30 |
| 960512 | GAGGCUGCU | | 001028.3_12- | UCAAGAUGU | | 001028.3_12- | |
| | | | 30_G19U_s | | | 30_C1A_as | |
| AD- | CAUCUUGACG | 35 | NM_ | ACGCAGCCUC | 445 | NM_ | 13-31 |
| 960513 | AGGCUGCGU | | 001028.3_13- | GUCAAGAUG | | 001028.3_13- | |
| | | | 31_G19U_s | | | 31_C1A_as | |
| AD- | AUCUUGACGA | 36 | NM_ | ACCGCAGCCU | 446 | NM_ | 14-32 |
| 960514 | GGCUGCGGU | | 001028.3_14- | CGUCAAGAU | | 001028.3_14- | |
| | | | 32_s | | | 32_as | |
| AD- | UCUUGACGAG | 37 | NM_ | AACCGCAGCC | 447 | NM_ | 15-33 |
| 960515 | GCUGCGGUU | | 001028.3_15- | UCGUCAAGA | | 001028.3_15- | |
| | | | 33_G19U_s | | | 33_C1A_as | |
| AD- | CUUGACGAGG | 38 | NM_ | ACACCGCAGC | 448 | NM_ | 16-34 |
| 960516 | CUGCGGUGU | | 001028.3_16- | CUCGUCAAG | | 001028.3_16- | |
| | | | 34_s | | | 34_as | |
| AD- | UUGACGAGGC | 39 | NM_ | AACACCGCAG | 449 | NM_ | 17-35 |
| 960517 | UGCGGUGUU | | 001028.3_17- | CCUCGUCAA | | 001028.3_17- | |
| | | | 35_C19U_s | | | 35_G1A_as | |
| AD- | UGACGAGGCU | 40 | NM_ | AGACACCGCA | 450 | NM_ | 18-36 |
| 960518 | GCGGUGUCU | | 001028.3_18- | GCCUCGUCA | | 001028.3_18- | |
| | | | 36_s | | | 36_as | |
| AD- | GACGAGGCUG | 41 | NM_ | AAGACACCGC | 451 | NM_ | 19-37 |
| 960519 | CGGUGUCUU | | 001028.3_19- | AGCCUCGUC | | 001028.3_19- | |
| | | | 37_G19U_s | | | 37_C1A_as | |
| AD- | ACGAGGCUGC | 42 | NM_ | ACAGACACCG | 452 | NM_ | 20-38 |
| 960520 | GGUGUCUGU | | 001028.3_20- | CAGCCUCGU | | 001028.3_20- | |
| | | | 38_C19U_s | | | 38_G1A_as | |
| AD- | CGAGGCUGCG | 43 | NM_ | AGCAGACACC | 453 | NM_ | 21-39 |
| 960521 | GUGUCUGCU | | 001028.3_21- | GCAGCCUCG | | 001028.3_21- | |
| | | | 39_s | | | 39_as | |
| AD- | GAGGCUGCGG | 44 | NM_ | AAGCAGACAC | 454 | NM_ | 22-40 |
| 960522 | UGUCUGCUU | | 001028.3_22- | CGCAGCCUC | | 001028.3_22- | |
| | | | 40_G19U_s | | | 40_C1A_as | |
| AD- | AGGCUGCGGU | 45 | NM_ | ACAGCAGACA | 455 | NM_ | 23-41 |
| 960523 | GUCUGCUGU | | 001028.3_23- | CCGCAGCCU | | 001028.3_23- | |
| | | | 41_C19U_s | | | 41_G1A_as | |
| AD- | GGCUGCGGUG | 46 | NM_ | AGCAGCAGAC | 456 | NM_ | 24-42 |
| 960524 | UCUGCUGCU | | 001028.3_24- | ACCGCAGCC | | 001028.3_24- | |
| | | | 42_s | | | 42_as | |
| AD- | GCUGCGGUGU | 47 | NM_ | AAGCAGCAGA | 457 | NM_ | 25-43 |
| 960525 | CUGCUGCUU | | 001028.3_25- | CACCGCAGC | | 001028.3_25- | |
| | | | 43_A19U_s | | | 43_U1A_as | |
| AD- | CUGCGGUGUC | 48 | NM_ | AUAGCAGCAG | 458 | NM_ | 26-44 |
| 960526 | UGCUGCUAU | | 001028.3_26- | ACACCGCAG | | 001028.3_26- | |
| | | | 44_s | | | 44_as | |
| AD- | UGCGGUGUCU | 49 | NM_ | AAUAGCAGCA | 459 | NM_ | 27-45 |
| 960527 | GCUGCUAUU | | 001028.3_27- | GACACCGCA | | 001028.3_27- | |
| | | | 45_s | | | 45_as | |
| AD- | GCGGUGUCUG | 50 | NM_ | AAAUAGCAGC | 460 | NM_ | 28-46 |
| 960528 | CUGCUAUUU | | 001028.3_28- | AGACACCGC | | 001028.3_28- | |
| | | | 46_C19U_s | | | 46_G1A_as | |
| AD- | CGGUGUCUGC | 51 | NM_ | AGAAUAGCAG | 461 | NM_ | 29-47 |
| 960529 | UGCUAUUCU | | 001028.3_29- | CAGACACCG | | 001028.3_29- | |
| | | | 47_s | | | 47_as | |
| AD- | GGUGUCUGCU | 52 | NM_ | AAGAAUAGCA | 462 | NM_ | 30-48 |
| 960530 | GCUAUUCUU | | 001028.3_30- | GCAGACACC | | 001028.3_30- | |
| | | | 48_C19U_s | | | 48_G1A_as | |
| AD- | GUGUCUGCUG | 53 | NM_ | AGAGAAUAGC | 463 | NM_ | 31-49 |
| 960531 | CUAUUCUCU | | 001028.3_31- | AGCAGACAC | | 001028.3_31- | |
| | | | 49_C19U_s | | | 49_G1A_as | |
| AD- | UGUCUGCUGC | 54 | NM_ | AGGAGAAUAG | 464 | NM_ | 32-50 |
| 960532 | UAUUCUCCU | | 001028.3_32- | CAGCAGACA | | 001028.3_32- | |
| | | | 50_G19U_s | | | 50_C1A_as | |
| AD- | GUCUGCUGCU | 55 | NM_ | ACGGAGAAUA | 465 | NM_ | 33-51 |
| 960533 | AUUCUCCGU | | 001028.3_33- | GCAGCAGAC | | 001028.3_33- | |
| | | | 51_A19U_s | | | 51_U1A_as | |
| AD- | UCUGCUGCUA | 56 | NM_ | AUCGGAGAAU | 466 | NM_ | 34-52 |
| 960534 | UUCUCCGAU | | 001028.3_34- | AGCAGCAGA | | 001028.3_34- | |
| | | | 52_G19U_s | | | 52_C1A_as | |
| AD- | CUGCUGCUAU | 57 | NM_ | ACUCGGAGAA | 467 | NM_ | 35-53 |
| 960535 | UCUCCGAGU | | 001028.3_35- | UAGCAGCAG | | 001028.3_35- | |
| | | | 53_C19U_s | | | 53_G1A_as | |
| AD- | UGCUGCUAUU | 58 | NM_ | AGCUCGGAGA | 468 | NM_ | 36-54 |
| 960536 | CUCCGAGCU | | 001028.3_36- | AUAGCAGCA | | 001028.3_36- | |
| | | | 54_s | | | 54_as | |
| AD- | GCUGCUAUUC | 59 | NM_ | AAGCUCGGAG | 469 | NM_ | 37-55 |
| 960537 | UCCGAGCUU | | 001028.3_37- | AAUAGCAGC | | 001028.3_37- | |
| | | | 55_s | | | 55_as | |
| AD- | CUGCUAUUCU | 60 | NM_ | AAAGCUCGGA | 470 | NM_ | 38-56 |
| 960538 | CCGAGCUUU | | 001028.3_38- | GAAUAGCAG | | 001028.3_38- | |
| | | | 56_C19U_s | | | 56_G1A_as | |
| AD- | UGCUAUUCUC | 61 | NM_ | AGAAGCUCGG | 471 | NM_ | 39-57 |
| 960539 | CGAGCUUCU | | 001028.3_39- | AGAAUAGCA | | 001028.3_39- | |
| | | | 57_G19U_s | | | 57_C1A_as | |
| AD- | GCUAUUCUCC | 62 | NM_ | ACGAAGCUCG | 472 | NM_ | 40-58 |
| 960540 | GAGCUUCGU | | 001028.3_40- | GAGAAUAGC | | 001028.3_40- | |
| | | | 58_C19U_s | | | 58_G1A_as | |
| AD- | CUAUUCUCCG | 63 | NM_ | AGCGAAGCUC | 473 | NM_ | 41-59 |
| 960541 | AGCUUCGCU | | 001028.3_41- | GGAGAAUAG | | 001028.3_41- | |
| | | | 59_A19U_s | | | 59_U1A_as | |
| AD- | UAUUCUCCGA | 64 | NM_ | AUGCGAAGCU | 474 | NM_ | 42-60 |
| 960542 | GCUUCGCAU | | 001028.3_42- | CGGAGAAUA | | 001028.3_42- | |
| | | | 60_A19U_s | | | 60_U1A_as | |
| AD- | AUUCUCCGAG | 65 | NM_ | AUUGCGAAGC | 475 | NM_ | 43-61 |
| 960543 | CUUCGCAAU | | 001028.3_43- | UCGGAGAAU | | 001028.3_43- | |
| | | | 61_s | | | 61_as | |
| AD- | UUCUCCGAGC | 66 | NM_ | AAUUGCGAAG | 476 | NM_ | 44-62 |
| 960544 | UUCGCAAUU | | 001028.3_44- | CUCGGAGAA | | 001028.3_44- | |
| | | | 62_G19U_s | | | 62_C1A_as | |
| AD- | UCUCCGAGCU | 67 | NM_ | ACAUUGCGAA | 477 | NM_ | 45-63 |
| 960545 | UCGCAAUGU | | 001028.3_45- | GCUCGGAGA | | 001028.3_45- | |
| | | | 63_C19U_s | | | 63_G1A_as | |
| AD- | CUCCGAGCUU | 68 | NM_ | AGCAUUGCGA | 478 | NM_ | 46-64 |
| 960546 | CGCAAUGCU | | 001028.3_46- | AGCUCGGAG | | 001028.3_46- | |
| | | | 64_C19U_s | | | 64_G1A_as | |
| AD- | UCCGAGCUUC | 69 | NM_ | AGGCAUUGCG | 479 | NM_ | 47-65 |
| 960547 | GCAAUGCCU | | 001028.3_47- | AAGCUCGGA | | 001028.3_47- | |
| | | | 65_G19U_s | | | 65_C1A_as | |
| AD- | CCGAGCUUCG | 70 | NM_ | ACGGCAUUGC | 480 | NM_ | 48-66 |
| 960548 | CAAUGCCGU | | 001028.3_48- | GAAGCUCGG | | 001028.3_48- | |
| | | | 66_C19U_s | | | 66_G1A_as | |
| AD- | CGAGCUUCGC | 71 | NM_ | AGCGGCAUUG | 481 | NM_ | 49-67 |
| 960549 | AAUGCCGCU | | 001028.3_49- | CGAAGCUCG | | 001028.3_49- | |
| | | | 67_C19U_s | | | 67_G1A_as | |
| AD- | GAGCUUCGCA | 72 | NM_ | AGGCGGCAUU | 482 | NM_ | 50-68 |
| 960550 | AUGCCGCCU | | 001028.3_50- | GCGAAGCUC | | 001028.3_50- | |
| | | | 68_s | | | 68_as | |
| AD- | AGCUUCGCAA | 73 | NM_ | AAGGCGGCAU | 483 | NM_ | 51-69 |
| 960551 | UGCCGCCUU | | 001028.3_51- | UGCGAAGCU | | 001028.3_51- | |
| | | | 69_A19U_s | | | 69_U1A_as | |
| AD- | GCUUCGCAAU | 74 | NM_ | AUAGGCGGCA | 484 | NM_ | 52-70 |
| 960552 | GCCGCCUAU | | 001028.3_52- | UUGCGAAGC | | 001028.3_52- | |
| | | | 70_A19U_s | | | 70_U1A_as | |
| AD- | CUUCGCAAUG | 75 | NM_ | AUUAGGCGGC | 485 | NM_ | 53-71 |
| 960553 | CCGCCUAAU | | 001028.3_53- | AUUGCGAAG | | 001028.3_53- | |
| | | | 71_G19U_s | | | 71_C1A_as | |
| AD- | UUCGCAAUGC | 76 | NM_ | ACUUAGGCGG | 486 | NM_ | 54-72 |
| 960554 | CGCCUAAGU | | 001028.3_54- | CAUUGCGAA | | 001028.3_54- | |
| | | | 72_G19U_s | | | 72_C1A_as | |
| AD- | UCGCAAUGCC | 77 | NM_ | ACCUUAGGCG | 487 | NM_ | 55-73 |
| 960555 | GCCUAAGGU | | 001028.3_55- | GCAUUGCGA | | 001028.3_55- | |
| | | | 73_A19U_s | | | 73_U1A_as | |
| AD- | CGCAAUGCCG | 78 | NM_ | AUCCUUAGGC | 488 | NM_ | 56-74 |
| 960556 | CCUAAGGAU | | 001028.3_56- | GGCAUUGCG | | 001028.3_56- | |
| | | | 74_C19U_s | | | 74_G1A_as | |
| AD- | GCAAUGCCGC | 79 | NM_ | AGUCCUUAGG | 489 | NM_ | 57-75 |
| 960557 | CUAAGGACU | | 001028.3_57- | CGGCAUUGC | | 001028.3_57- | |
| | | | 75_G19U_s | | | 75_C1A_as | |
| AD- | CAAUGCCGCC | 80 | NM_ | ACGUCCUUAG | 490 | NM_ | 58-76 |
| 960558 | UAAGGACGU | | 001028.3_58- | GCGGCAUUG | | 001028.3_58- | |
| | | | 76_A19U_s | | | 76_U1A_as | |
| AD- | AAUGCCGCCU | 81 | NM_ | AUCGUCCUUA | 491 | NM_ | 59-77 |
| 960559 | AAGGACGAU | | 001028.3_59- | GGCGGCAUU | | 001028.3_59- | |
| | | | 77_C19U_s | | | 77_G1A_as | |
| AD- | AUGCCGCCUA | 82 | NM_ | AGUCGUCCUU | 492 | NM_ | 60-78 |
| 960560 | AGGACGACU | | 001028.3_60- | AGGCGGCAU | | 001028.3_60- | |
| | | | 78_A19U_s | | | 78_U1A_as | |
| AD- | UGCCGCCUAA | 83 | NM_ | AUGUCGUCCU | 493 | NM_ | 61-79 |
| 960561 | GGACGACAU | | 001028.3_61- | UAGGCGGCA | | 001028.3_61- | |
| | | | 79_A19U_s | | | 79_U1A_as | |
| AD- | GCCGCCUAAG | 84 | NM_ | AUUGUCGUCC | 494 | NM_ | 62-80 |
| 960562 | GACGACAAU | | 001028.3_62- | UUAGGCGGC | | 001028.3_62- | |
| | | | 80_G19U_s | | | 80_C1A_as | |
| AD- | CCGCCUAAGG | 85 | NM_ | ACUUGUCGUC | 495 | NM_ | 63-81 |
| 960563 | ACGACAAGU | | 001028.3_63- | CUUAGGCGG | | 001028.3_63- | |
| | | | 81_A19U_s | | | 81_U1A_as | |
| AD- | CGCCUAAGGA | 86 | NM_ | AUCUUGUCGU | 496 | NM_ | 64-82 |
| 960564 | CGACAAGAU | | 001028.3_64- | CCUUAGGCG | | 001028.3_64- | |
| | | | 82_A19U_s | | | 82_U1A_as | |
| AD- | GCCUAAGGAC | 87 | NM_ | AUUCUUGUCG | 497 | NM_ | 65-83 |
| 960565 | GACAAGAAU | | 001028.3_65- | UCCUUAGGC | | 001028.3_65- | |
| | | | 83_G19U_s | | | 83_C1A_as | |
| AD- | CCUAAGGACG | 88 | NM_ | ACUUCUUGUC | 498 | NM_ | 66-84 |
| 960566 | ACAAGAAGU | | 001028.3_66- | GUCCUUAGG | | 001028.3_66- | |
| | | | 84_A19U_s | | | 84_U1A_as | |
| AD- | CUAAGGACGA | 89 | NM_ | AUCUUCUUGU | 499 | NM_ | 67-85 |
| 960567 | CAAGAAGAU | | 001028.3_67- | CGUCCUUAG | | 001028.3_67- | |
| | | | 85_A19U_s | | | 85_U1A_as | |
| AD- | UAAGGACGAC | 90 | NM_ | AUUCUUCUUG | 500 | NM_ | 68-86 |
| 960568 | AAGAAGAAU | | 001028.3_68- | UCGUCCUUA | | 001028.3_68- | |
| | | | 86_G19U_s | | | 86_C1A_as | |
| AD- | AAGGACGACA | 91 | NM_ | ACUUCUUCUU | 501 | NM_ | 69-87 |
| 960569 | AGAAGAAGU | | 001028.3_69- | GUCGUCCUU | | 001028.3_69- | |
| | | | 87_A19U_s | | | 87_U1A_as | |
| AD- | AGGACGACAA | 92 | NM_ | AUCUUCUUCU | 502 | NM_ | 70-88 |
| 960570 | GAAGAAGAU | | 001028.3_70- | UGUCGUCCU | | 001028.3_70- | |
| | | | 88_A19U_s | | | 88_U1A_as | |
| AD- | GGACGACAAG | 93 | NM_ | AUUCUUCUUC | 503 | NM_ | 71-89 |
| 960571 | AAGAAGAAU | | 001028.3_71- | UUGUCGUCC | | 001028.3_71- | |
| | | | 89_G19U_s | | | 89_C1A_as | |
| AD- | GACGACAAGA | 94 | NM_ | ACUUCUUCUU | 504 | NM_ | 72-90 |
| 960572 | AGAAGAAGU | | 001028.3_72- | CUUGUCGUC | | 001028.3_72- | |
| | | | 90_G19U_s | | | 90_C1A_as | |
| AD- | ACGACAAGAA | 95 | NM_ | ACCUUCUUCU | 505 | NM_ | 73-91 |
| 960573 | GAAGAAGGU | | 001028.3_73- | UCUUGUCGU | | 001028.3_73- | |
| | | | 91_A19U_s | | | 91_U1A_as | |
| AD- | CGACAAGAAG | 96 | NM_ | AUCCUUCUUC | 506 | NM_ | 74-92 |
| 960574 | AAGAAGGAU | | 001028.3_74- | UUCUUGUCG | | 001028.3_74- | |
| | | | 92_C19U_s | | | 92_G1A_as | |
| AD- | GACAAGAAGA | 97 | NM_ | AGUCCUUCUU | 507 | NM_ | 75-93 |
| 960575 | AGAAGGACU | | 001028.3_75- | CUUCUUGUC | | 001028.3_75- | |
| | | | 93_G19U_s | | | 93_C1A_as | |
| AD- | ACAAGAAGAA | 98 | NM_ | ACGUCCUUCU | 508 | NM_ | 76-94 |
| 960576 | GAAGGACGU | | 001028.3_76- | UCUUCUUGU | | 001028.3_76- | |
| | | | 94_C19U_s | | | 94_G1A_as | |
| AD- | CAAGAAGAAG | 99 | NM_ | AGCGUCCUUC | 509 | NM_ | 77-95 |
| 960577 | AAGGACGCU | | 001028.3_77- | UUCUUCUUG | | 001028.3_77- | |
| | | | 95_s | | | 95_as | |
| AD- | AAGAAGAAGA | 100 | NM_ | AAGCGUCCUU | 510 | NM_ | 78-96 |
| 960578 | AGGACGCUU | | 001028.3_78- | CUUCUUCUU | | 001028.3_78- | |
| | | | 96_G19U_s | | | 96_C1A_as | |
| AD- | AGAAGAAGAA | 101 | NM_ | ACAGCGUCCU | 511 | NM_ | 79-97 |
| 960579 | GGACGCUGU | | 001028.3_79- | UCUUCUUCU | | 001028.3_79- | |
| | | | 97_G19U_s | | | 97_C1A_as | |
| AD- | GAAGAAGAAG | 102 | NM_ | ACCAGCGUCC | 512 | NM_ | 80-98 |
| 960580 | GACGCUGGU | | 001028.3_80- | UUCUUCUUC | | 001028.3_80- | |
| | | | 98_A19U_s | | | 98_U1A_as | |
| AD- | AAGAAGAAGG | 103 | NM_ | AUCCAGCGUC | 513 | NM_ | 81-99 |
| 960581 | ACGCUGGAU | | 001028.3_81- | CUUCUUCUU | | 001028.3_81- | |
| | | | 99_A19U_s | | | 99_U1A_as | |
| AD- | AGAAGAAGGA | 104 | NM_ | AUUCCAGCGU | 514 | NM_ | 82-100 |
| 960582 | CGCUGGAAU | | 001028.3_82- | CCUUCUUCU | | 001028.3_82- | |
| | | | 100_A19U_s | | | 100_U1A_as | |
| AD- | GAAGAAGGAC | 105 | NM_ | AUUUCCAGCG | 515 | NM_ | 83-101 |
| 960583 | GCUGGAAAU | | 001028.3_83- | UCCUUCUUC | | 001028.3_83- | |
| | | | 101_G19U_s | | | 101_C1A_as | |
| AD- | AAGAAGGACG | 106 | NM_ | ACUUUCCAGC | 516 | NM_ | 84-102 |
| 960584 | CUGGAAAGU | | 001028.3_84- | GUCCUUCUU | | 001028.3_84- | |
| | | | 102_s | | | 102_as | |
| AD- | AGAAGGACGC | 107 | NM_ | AACUUUCCAG | 517 | NM_ | 85-103 |
| 960585 | UGGAAAGUU | | 001028.3_85- | CGUCCUUCU | | 001028.3_85- | |
| | | | 103_C19U_s | | | 103_G1A_as | |
| AD- | GAAGGACGCU | 108 | NM_ | AGACUUUCCA | 518 | NM_ | 86-104 |
| 960586 | GGAAAGUCU | | 001028.3_86- | GCGUCCUUC | | 001028.3_86- | |
| | | | 104_G19U_s | | | 104_C1A_as | |
| AD- | AAGGACGCUG | 109 | NM_ | ACGACUUUCC | 519 | NM_ | 87-105 |
| 960587 | GAAAGUCGU | | 001028.3_87- | AGCGUCCUU | | 001028.3_87- | |
| | | | 105_G19U_s | | | 105_C1A_as | |
| AD- | AGGACGCUGG | 110 | NM_ | ACCGACUUUC | 520 | NM_ | 88-106 |
| 960588 | AAAGUCGGU | | 001028.3_88- | CAGCGUCCU | | 001028.3_88- | |
| | | | 106_C19U_s | | | 106_G1A_as | |
| AD- | GGACGCUGGA | ill | NM_ | AGCCGACUUU | 521 | NM_ | 89-107 |
| 960589 | AAGUCGGCU | | 001028.3_89- | CCAGCGUCC | | 001028.3_89- | |
| | | | 107_C19U_s | | | 107_G1A_as | |
| AD- | GACGCUGGAA | 112 | NM_ | AGGCCGACUU | 522 | NM_ | 90-108 |
| 960590 | AGUCGGCCU | | 001028.3_90- | UCCAGCGUC | | 001028.3_90- | |
| | | | 108_A19U_s | | | 108_U1A_as | |
| AD- | ACGCUGGAAA | 113 | NM_ | AUGGCCGACU | 523 | NM_ | 91-109 |
| 960591 | GUCGGCCAU | | 001028.3_91- | UUCCAGCGU | | 001028.3_91- | |
| | | | 109_A19U_s | | | 109_U1A_as | |
| AD- | CGCUGGAAAG | 114 | NM_ | AUUGGCCGAC | 524 | NM_ | 92-110 |
| 960592 | UCGGCCAAU | | 001028.3_92- | UUUCCAGCG | | 001028.3_92- | |
| | | | 110_G19U_s | | | 110_C1A_as | |
| AD- | GCUGGAAAGU | 115 | NM_ | ACUUGGCCGA | 525 | NM_ | 93-111 |
| 960593 | CGGCCAAGU | | 001028.3_93- | CUUUCCAGC | | 001028.3_93- | |
| | | | 111_A19U_s | | | 111_U1A_as | |
| AD- | CUGGAAAGUC | 116 | NM_ | AUCUUGGCCG | 526 | NM_ | 94-112 |
| 960594 | GGCCAAGAU | | 001028.3_94- | ACUUUCCAG | | 001028.3_94- | |
| | | | 112_A19U_s | | | 112_U1A_as | |
| AD- | UGGAAAGUCG | 117 | NM_ | AUUCUUGGCC | 527 | NM_ | 95-113 |
| 960595 | GCCAAGAAU | | 001028.3_95- | GACUUUCCA | | 001028.3_95- | |
| | | | 113_A19U_s | | | 113_U1A_as | |
| AD- | GGAAAGUCGG | 118 | NM_ | AUUUCUUGGC | 528 | NM_ | 96-114 |
| 960596 | CCAAGAAAU | | 001028.3_96- | CGACUUUCC | | 001028.3_96- | |
| | | | 114_G19U_s | | | 114_C1A_as | |
| AD- | GAAAGUCGGC | 119 | NM_ | ACUUUCUUGG | 529 | NM_ | 97-115 |
| 960597 | CAAGAAAGU | | 001028.3_97- | CCGACUUUC | | 001028.3_97- | |
| | | | 115_A19U_s | | | 115_U1A_as | |
| AD- | AAAGUCGGCC | 120 | NM_ | AUCUUUCUUG | 530 | NM_ | 98-116 |
| 960598 | AAGAAAGAU | | 001028.3_98- | GCCGACUUU | | 001028.3_98- | |
| | | | 116_C19U_s | | | 116_G1A_as | |
| AD- | AAGUCGGCCA | 121 | NM_ | AGUCUUUCUU | 531 | NM_ | 99-117 |
| 960599 | AGAAAGACU | | 001028.3_99- | GGCCGACUU | | 001028.3_99- | |
| | | | 117_A19U_s | | | 117_U1A_as | |
| AD- | AGUCGGCCAA | 122 | NM_ | AUGUCUUUCU | 532 | NM_ | 100-118 |
| 960600 | GAAAGACAU | | 001028.3_100- | UGGCCGACU | | 001028.3_100- | |
| | | | 118_A19U_s | | | 118_U1A_as | |
| AD- | GUCGGCCAAG | 123 | NM_ | AUUGUCUUUC | 533 | NM_ | 101-119 |
| 960601 | AAAGACAAU | | 001028.3_101- | UUGGCCGAC | | 001028.3_101- | |
| | | | 119_A19U_s | | | 119_U1A_as | |
| AD- | UCGGCCAAGA | 124 | NM_ | AUUUGUCUUU | 534 | NM_ | 102-120 |
| 960602 | AAGACAAAU | | 001028.3_ 102- | CUUGGCCGA | | 001028.3_102- | |
| | | | 120_G19U_s | | | 120_C1A_as | |
| AD- | CGGCCAAGAA | 125 | NM_ | ACUUUGUCUU | 535 | NM_ | 103-121 |
| 960603 | AGACAAAGU | | 001028.3_103- | UCUUGGCCG | | 001028.3_103- | |
| | | | 121_A19U_s | | | 121_U1A_as | |
| AD- | GGCCAAGAAA | 126 | NM_ | AUCUUUGUCU | 536 | NM_ | 104-122 |
| 960604 | GACAAAGAU | | 001028.3_ 104- | UUCUUGGCC | | 001028.3_104- | |
| | | | 122_C19U_s | | | 122_G1A_as | |
| AD- | GCCAAGAAAG | 127 | NM_ | AGUCUUUGUC | 537 | NM_ | 105-123 |
| 960605 | ACAAAGACU | | 001028.3_ 105- | UUUCUUGGC | | 001028.3_105- | |
| | | | 123_C19U_s | | | 123_G1A_as | |
| AD- | CCAAGAAAGA | 128 | NM_ | AGGUCUUUGU | 538 | NM_ | 106-124 |
| 960606 | CAAAGACCU | | 001028.3_ 106- | CUUUCUUGG | | 001028.3_106- | |
| | | | 124_C19U_s | | | 124_G1A_as | |
| AD- | CAAGAAAGAC | 129 | NM_ | AGGGUCUUUG | 539 | NM_ | 107-125 |
| 960607 | AAAGACCCU | | 001028.3_ 107- | UCUUUCUUG | | 001028.3_107- | |
| | | | 125_A19U_s | | | 125_U1A_as | |
| AD- | AGAAAGACAA | 130 | NM_ | ACUGGGUCUU | 540 | NM_ | 109-127 |
| 960608 | AGACCCAGU | | 001028.3_109- | UGUCUUUCU | | 001028.3_109- | |
| | | | 127_s | | | 127_as | |
| AD- | GAAAGACAAA | 131 | NM_ | AACUGGGUCU | 541 | NM_ | 110-128 |
| 960609 | GACCCAGUU | | 001028.3_110- | UUGUCUUUC | | 001028.3_110- | |
| | | | 128_G19U_s | | | 128_C1A_as | |
| AD- | AAAGACAAAG | 132 | NM_ | ACACUGGGUC | 542 | NM_ | 111-129 |
| 960610 | ACCCAGUGU | | 001028.3_1 11- | UUUGUCUUU | | 001028.3_111- | |
| | | | 129_A19U_s | | | 129_U1A_as | |
| AD- | AAGACAAAGA | 133 | NM_ | AUCACUGGGU | 543 | NM_ | 112-130 |
| 960611 | CCCAGUGAU | | 001028.3_112- | CUUUGUCUU | | 001028.3_112- | |
| | | | 130_A19U_s | | | 130_U1A_as | |
| AD- | AGACAAAGAC | 134 | NM_ | AUUCACUGGG | 544 | NM_ | 113-131 |
| 960612 | CCAGUGAAU | | 001028.3_113- | UCUUUGUCU | | 001028.3_113- | |
| | | | 131_C19U_s | | | 131_G1A_as | |
| AD- | GACAAAGACC | 135 | NM_ | AGUUCACUGG | 545 | NM_ | 114-132 |
| 960613 | CAGUGAACU | | 001028.3_114- | GUCUUUGUC | | 001028.3_114- | |
| | | | 132_A19U_s | | | 132_U1A_as | |
| AD- | ACAAAGACCC | 136 | NM_ | AUGUUCACUG | 546 | NM_ | 115-133 |
| 960614 | AGUGAACAU | | 001028.3_115- | GGUCUUUGU | | 001028.3_115- | |
| | | | 133_A19U_s | | | 133_U1A_as | |
| AD- | CAAAGACCCA | 137 | NM_ | AUUGUUCACU | 547 | NM_ | 116-134 |
| 960615 | GUGAACAAU | | 001028.3_116- | GGGUCUUUG | | 001028.3_116- | |
| | | | 134_A19U_s | | | 134_U1A_as | |
| AD- | AAAGACCCAG | 138 | NM_ | AUUUGUUCAC | 548 | NM_ | 117-135 |
| 960616 | UGAACAAAU | | 001028.3_117- | UGGGUCUUU | | 001028.3_117- | |
| | | | 135_s | | | 135_as | |
| AD- | AAGACCCAGU | 139 | NM_ | AAUUUGUUCA | 549 | NM_ | 118-136 |
| 960617 | GAACAAAUU | | 001028.3_118- | CUGGGUCUU | | 001028.3_118- | |
| | | | 136_C19U_s | | | 136_G1A_as | |
| AD- | AGACCCAGUG | 140 | NM_ | AGAUUUGUUC | 550 | NM_ | 119-137 |
| 960618 | AACAAAUCU | | 001028.3_119- | ACUGGGUCU | | 001028.3_119- | |
| | | | 137_C19U_s | | | 137_G1A_as | |
| AD- | GACCCAGUGA | 141 | NM_ | AGGAUUUGUU | 551 | NM_ | 120-138 |
| 960619 | ACAAAUCCU | | 001028.3_ 120- | CACUGGGUC | | 001028.3_120- | |
| | | | 138_G19U_s | | | 138_C1A_as | |
| AD- | ACCCAGUGAA | 142 | NM_ | ACGGAUUUGU | 552 | NM_ | 121-139 |
| 960620 | CAAAUCCGU | | 001028.3_121- | UCACUGGGU | | 001028.3_121- | |
| | | | 139_G19U_s | | | 139_C1A_as | |
| AD- | CCCAGUGAAC | 143 | NM_ | ACCGGAUUUG | 553 | NM_ | 122-140 |
| 960621 | AAAUCCGGU | | 001028.3_ 122- | UUCACUGGG | | 001028.3_122- | |
| | | | 140_G19U_s | | | 140_C1A_as | |
| AD- | GGGCAAGGCC | 144 | NM_ | AUUCUUUUUG | 554 | NM_ | 140-158 |
| 960622 | AAAAAGAAU | | 001028.3_ 140- | GCCUUGCCC | | 001028.3_140- | |
| | | | 158_G19U_s | | | 158_C1A_as | |
| AD- | GGCAAGGCCA | 145 | NM_ | ACUUCUUUUU | 555 | NM_ | 141-159 |
| 960623 | AAAAGAAGU | | 001028.3_141- | GGCCUUGCC | | 001028.3_141- | |
| | | | 159_A19U_s | | | 159_U1A_as | |
| AD- | GCAAGGCCAA | 146 | NM_ | AUCUUCUUUU | 556 | NM_ | 142-160 |
| 960624 | AAAGAAGAU | | 001028.3_ 142- | UGGCCUUGC | | 001028.3_142- | |
| | | | 160_A19U_s | | | 160_U1A_as | |
| AD- | AGGCCAAAAA | 147 | NM_ | AACUUCUUCU | 557 | NM_ | 145-163 |
| 960625 | GAAGAAGUU | | 001028.3_ 145- | UUUUGGCCU | | 001028.3_145- | |
| | | | 163_G19U_s | | | 163_C1A_as | |
| AD- | GGCCAAAAAG | 148 | NM_ | ACACUUCUUC | 558 | NM_ | 146-164 |
| 960626 | AAGAAGUGU | | 001028.3_ 146- | UUUUUGGCC | | 001028.3_146- | |
| | | | 164_G19U_s | | | 164_C1A_as | |
| AD- | GCCAAAAAGA | 149 | NM_ | ACCACUUCUU | 559 | NM_ | 147-165 |
| 960627 | AGAAGUGGU | | 001028.3_ 147- | CUUUUUGGC | | 001028.3_147- | |
| | | | 165_s | | | 165_as | |
| AD- | CCAAAAAGAA | 150 | NM_ | AACCACUUCU | 560 | NM_ | 148-166 |
| 960628 | GAAGUGGUU | | 001028.3_148- | UCUUUUUGG | | 001028.3_148- | |
| | | | 166_C19U_s | | | 166_G1A_as | |
| AD- | CAAAAAGAAG | 151 | NM_ | AGACCACUUC | 561 | NM_ | 149-167 |
| 960629 | AAGUGGUCU | | 001028.3_149- | UUCUUUUUG | | 001028.3_149- | |
| | | | 167_C19U_s | | | 167_G1A_as | |
| AD- | AAAAAGAAGA | 152 | NM_ | AGGACCACUU | 562 | NM_ | 150-168 |
| 960630 | AGUGGUCCU | | 001028.3_ 150- | CUUCUUUUU | | 001028.3_150- | |
| | | | 168_A19U_s | | | 168_U1A_as | |
| AD- | AAAAGAAGAA | 153 | NM_ | AUGGACCACU | 563 | NM_ | 151-169 |
| 960631 | GUGGUCCAU | | 001028.3_151- | UCUUCUUUU | | 001028.3_151- | |
| | | | 169_A19U_s | | | 169_U1A_as | |
| AD- | AAAGAAGAAG | 154 | NM_ | AUUGGACCAC | 564 | NM_ | 152-170 |
| 960632 | UGGUCCAAU | | 001028.3_ 152- | UUCUUCUUU | | 001028.3_152- | |
| | | | 170_A19U_s | | | 170_U1A_as | |
| AD- | AAGAAGAAGU | 155 | NM_ | AUUUGGACCA | 565 | NM_ | 153-171 |
| 960633 | GGUCCAAAU | | 001028.3_153- | CUUCUUCUU | | 001028.3_153- | |
| | | | 171_G19U_s | | | 171_C1A_as | |
| AD- | AGAAGAAGUG | 156 | NM_ | ACUUUGGACC | 566 | NM_ | 154-172 |
| 960634 | GUCCAAAGU | | 001028.3_154- | ACUUCUUCU | | 001028.3_154- | |
| | | | 172_G19U_s | | | 172_C1A_as | |
| AD- | GAAGAAGUGG | 157 | NM_ | ACCUUUGGAC | 567 | NM_ | 155-173 |
| 960635 | UCCAAAGGU | | 001028.3_155- | CACUUCUUC | | 001028.3_155- | |
| | | | 173_C19U_s | | | 173_G1A_as | |
| AD- | AAGAAGUGGU | 158 | NM_ | AGCCUUUGGA | 568 | NM_ | 156-174 |
| 960636 | CCAAAGGCU | | 001028.3_ 156- | CCACUUCUU | | 001028.3_156- | |
| | | | 174_A19U_s | | | 174_U1A_as | |
| AD- | AGAAGUGGUC | 159 | NM_ | AUGCCUUUGG | 569 | NM_ | 157-175 |
| 960637 | CAAAGGCAU | | 001028.3_157- | ACCACUUCU | | 001028.3_157- | |
| | | | 175_A19U_s | | | 175_U1A_as | |
| AD- | GAAGUGGUCC | 160 | NM_ | AUUGCCUUUG | 570 | NM_ | 158-176 |
| 960638 | AAAGGCAAU | | 001028.3_158- | GACCACUUC | | 001028.3_158- | |
| | | | 176_A19U_s | | | 176_U1A_as | |
| AD- | AAGUGGUCCA | 161 | NM_ | AUUUGCCUUU | 571 | NM_ | 159-177 |
| 960639 | AAGGCAAAU | | 001028.3_159- | GGACCACUU | | 001028.3_159- | |
| | | | 177_G19U_s | | | 177_C1A_as | |
| AD- | AGUGGUCCAA | 162 | NM_ | ACUUUGCCUU | 572 | NM_ | 160-178 |
| 960640 | AGGCAAAGU | | 001028.3_ 160- | UGGACCACU | | 001028.3_160- | |
| | | | 178_s | | | 178_as | |
| AD- | GUGGUCCAAA | 163 | NM_ | AACUUUGCCU | 573 | NM_ | 161-179 |
| 960641 | GGCAAAGUU | | 001028.3_161- | UUGGACCAC | | 001028.3_161- | |
| | | | 179_s | | | 179_as | |
| AD- | UGGUCCAAAG | 164 | NM_ | AAACUUUGCC | 574 | NM_ | 162-180 |
| 960642 | GCAAAGUUU | | 001028.3_ 162- | UUUGGACCA | | 001028.3_162- | |
| | | | 180_C19U_s | | | 180_G1A_as | |
| AD- | GGUCCAAAGG | 165 | NM_ | AGAACUUUGC | 575 | NM_ | 163-181 |
| 960643 | CAAAGUUCU | | 001028.3_163- | CUUUGGACC | | 001028.3_163- | |
| | | | 181_G19U_s | | | 181_C1A_as | |
| AD- | GUCCAAAGGC | 166 | NM_ | ACGAACUUUG | 576 | NM_ | 164-182 |
| 960644 | AAAGUUCGU | | 001028.3_ 164- | CCUUUGGAC | | 001028.3_164- | |
| | | | 182_G19U_s | | | 182_C1A_as | |
| AD- | UCCAAAGGCA | 167 | NM_ | ACCGAACUUU | 577 | NM_ | 165-183 |
| 960645 | AAGUUCGGU | | 001028.3_ 165- | GCCUUUGGA | | 001028.3_165- | |
| | | | 183_G19U_s | | | 183_C1A_as | |
| AD- | CCAAAGGCAA | 168 | NM_ | ACCCGAACUU | 578 | NM_ | 166-184 |
| 960646 | AGUUCGGGU | | 001028.3_ 166- | UGCCUUUGG | | 001028.3_166- | |
| | | | 184_A19U_s | | | 184_U1A_as | |
| AD- | CAAAGGCAAA | 169 | NM_ | AUCCCGAACU | 579 | NM_ | 167-185 |
| 960647 | GUUCGGGAU | | 001028.3_ 167- | UUGCCUUUG | | 001028.3_167- | |
| | | | 185_C19U_s | | | 185_G1A_as | |
| AD- | AAAGGCAAAG | 170 | NM_ | AGUCCCGAAC | 580 | NM_ | 168-186 |
| 960648 | UUCGGGACU | | 001028.3_168- | UUUGCCUUU | | 001028.3_168- | |
| | | | 186_A19U_s | | | 186_U1A_as | |
| AD- | AAGGCAAAGU | 171 | NM_ | AUGUCCCGAA | 581 | NM_ | 169-187 |
| 960649 | UCGGGACAU | | 001028.3_169- | CUUUGCCUU | | 001028.3_169- | |
| | | | 187_A19U_s | | | 187_U1A_as | |
| AD- | AGGCAAAGUU | 172 | NM_ | AUUGUCCCGA | 582 | NM_ | 170-188 |
| 960650 | CGGGACAAU | | 001028.3_ 170- | ACUUUGCCU | | 001028.3_170- | |
| | | | 188_G19U_s | | | 188_C1A_as | |
| AD- | GGCAAAGUUC | 173 | NM_ | ACUUGUCCCG | 583 | NM_ | 171-189 |
| 960651 | GGGACAAGU | | 001028.3_171- | AACUUUGCC | | 001028.3_171- | |
| | | | 189_C19U_s | | | 189_G1A_as | |
| AD- | GCAAAGUUCG | 174 | NM_ | AGCUUGUCCC | 584 | NM_ | 172-190 |
| 960652 | GGACAAGCU | | 001028.3_ 172- | GAACUUUGC | | 001028.3_172- | |
| | | | 190_s | | | 190_as | |
| AD- | CAAAGUUCGG | 175 | NM_ | AAGCUUGUCC | 585 | NM_ | 173-191 |
| 960653 | GACAAGCUU | | 001028.3_173- | CGAACUUUG | | 001028.3_173- | |
| | | | 191_C19U_s | | | 191_G1A_as | |
| AD- | AAAGUUCGGG | 176 | NM_ | AGAGCUUGUC | 586 | NM_ | 174-192 |
| 960654 | ACAAGCUCU | | 001028.3_ 174- | CCGAACUUU | | 001028.3_174- | |
| | | | 192_A19U_s | | | 192_U1A_as | |
| AD- | AAGUUCGGGA | 177 | NM_ | AUGAGCUUGU | 587 | NM_ | 175-193 |
| 960655 | CAAGCUCAU | | 001028.3_175- | CCCGAACUU | | 001028.3_175- | |
| | | | 193_A19U_s | | | 193_U1A_as | |
| AD- | AGUUCGGGAC | 178 | NM_ | AUUGAGCUUG | 588 | NM_ | 176-194 |
| 960656 | AAGCUCAAU | | 001028.3_ 176- | UCCCGAACU | | 001028.3_176- | |
| | | | 194_s | | | 194_as | |
| AD- | GUUCGGGACA | 179 | NM_ | AAUUGAGCUU | 589 | NM_ | 177-195 |
| 960657 | AGCUCAAUU | | 001028.3_177- | GUCCCGAAC | | 001028.3_177- | |
| | | | 195_A19U_s | | | 195_U1A_as | |
| AD- | UUCGGGACAA | 180 | NM_ | AUAUUGAGCU | 590 | NM_ | 178-196 |
| 960658 | GCUCAAUAU | | 001028.3_178- | UGUCCCGAA | | 001028.3_178- | |
| | | | 196_A19U_s | | | 196_U1A_as | |
| AD- | UCGGGACAAG | 181 | NM_ | AUUAUUGAGC | 591 | NM_ | 179-197 |
| 960659 | CUCAAUAAU | | 001028.3_179- | UUGUCCCGA | | 001028.3_179- | |
| | | | 197_C19U_s | | | 197_G1A_as | |
| AD- | CGGGACAAGC | 182 | NM_ | AGUUAUUGAG | 592 | NM_ | 180-198 |
| 960660 | UCAAUAACU | | 001028.3_180- | CUUGUCCCG | | 001028.3_180- | |
| | | | 198_s | | | 198_as | |
| AD- | GGGACAAGCU | 183 | NM_ | AAGUUAUUGA | 593 | NM_ | 181-199 |
| 960661 | CAAUAACUU | | 001028.3_181- | GCUUGUCCC | | 001028.3_181- | |
| | | | 199_s | | | 199_as | |
| AD- | GGACAAGCUC | 184 | NM_ | AAAGUUAUUG | 594 | NM_ | 182-200 |
| 960662 | AAUAACUUU | | 001028.3_182- | AGCUUGUCC | | 001028.3_182- | |
| | | | 200_A19U_s | | | 200_U1A_as | |
| AD- | GACAAGCUCA | 185 | NM_ | AUAAGUUAUU | 595 | NM_ | 183-201 |
| 960663 | AUAACUUAU | | 001028.3_183- | GAGCUUGUC | | 001028.3_183- | |
| | | | 201_G19U_s | | | 201_C1A_as | |
| AD- | ACAAGCUCAA | 186 | NM_ | ACUAAGUUAU | 596 | NM_ | 184-202 |
| 960664 | UAACUUAGU | | 001028.3_ 184- | UGAGCUUGU | | 001028.3_184- | |
| | | | 202_s | | | 202_as | |
| AD- | CAAGCUCAAU | 187 | NM_ | AACUAAGUUA | 597 | NM_ | 185-203 |
| 960665 | AACUUAGUU | | 001028.3_185- | UUGAGCUUG | | 001028.3_185- | |
| | | | 203_C19U_s | | | 203_G1A_as | |
| AD- | AAGCUCAAUA | 188 | NM_ | AGACUAAGUU | 598 | NM_ | 186-204 |
| 960666 | ACUUAGUCU | | 001028.3_186- | AUUGAGCUU | | 001028.3_186- | |
| | | | 204_s | | | 204_as | |
| AD- | AGCUCAAUAA | 189 | NM_ | AAGACUAAGU | 599 | NM_ | 187-205 |
| 960667 | CUUAGUCUU | | 001028.3_187- | UAUUGAGCU | | 001028.3_187- | |
| | | | 205_s | | | 205_as | |
| AD- | GCUCAAUAAC | 190 | NM_ | AAAGACUAAG | 600 | NM_ | 188-206 |
| 960668 | UUAGUCUUU | | 001028.3_188- | UUAUUGAGC | | 001028.3_188- | |
| | | | 206_G19U_s | | | 206_C1A_as | |
| AD- | CUCAAUAACU | 191 | NM_ | ACAAGACUAA | 601 | NM_ | 189-207 |
| 960669 | UAGUCUUGU | | 001028.3_189- | GUUAUUGAG | | 001028.3_189- | |
| | | | 207_s | | | 207_as | |
| AD- | UCAAUAACUU | 192 | NM_ | AACAAGACUA | 602 | NM_ | 190-208 |
| 960670 | AGUCUUGUU | | 001028.3_190- | AGUUAUUGA | | 001028.3_190- | |
| | | | 208_s | | | 208_as | |
| AD- | CAAUAACUUA | 193 | NM_ | AAACAAGACU | 603 | NM_ | 191-209 |
| 960671 | GUCUUGUUU | | 001028.3_191- | AAGUUAUUG | | 001028.3_191- | |
| | | | 209_s | | | 209_as | |
| AD- | AAUAACUUAG | 194 | NM_ | AAAACAAGAC | 604 | NM_ | 192-210 |
| 960672 | UCUUGUUUU | | 001028.3_192- | UAAGUUAUU | | 001028.3_192- | |
| | | | 210_G19U_s | | | 210_C1A_as | |
| AD- | AUAACUUAGU | 195 | NM_ | ACAAACAAGA | 605 | NM_ | 193-211 |
| 960673 | CUUGUUUGU | | 001028.3_193- | CUAAGUUAU | | 001028.3_193- | |
| | | | 211_A19U_s | | | 211_U1A_as | |
| AD- | UAACUUAGUC | 196 | NM_ | AUCAAACAAG | 606 | NM_ | 194-212 |
| 960674 | UUGUUUGAU | | 001028.3_ 194- | ACUAAGUUA | | 001028.3_194- | |
| | | | 212_C19U_s | | | 212_G1A_as | |
| AD- | AACUUAGUCU | 197 | NM_ | AGUCAAACAA | 607 | NM_ | 195-213 |
| 960675 | UGUUUGACU | | 001028.3_195- | GACUAAGUU | | 001028.3_195- | |
| | | | 213_A19U_s | | | 213_U1A_as | |
| AD- | ACUUAGUCUU | 198 | NM_ | AUGUCAAACA | 608 | NM_ | 196-214 |
| 960676 | GUUUGACAU | | 001028.3_196- | AGACUAAGU | | 001028.3_196- | |
| | | | 214_A19U_s | | | 214_U1A_as | |
| AD- | CUUAGUCUUG | 199 | NM_ | AUUGUCAAAC | 609 | NM_ | 197-215 |
| 960677 | UUUGACAAU | | 001028.3_197- | AAGACUAAG | | 001028.3_197- | |
| | | | 215_A19U_s | | | 215_U1A_as | |
| AD- | UUAGUCUUGU | 200 | NM_ | AUUUGUCAAA | 610 | NM_ | 198-216 |
| 960678 | UUGACAAAU | | 001028.3_198- | CAAGACUAA | | 001028.3_198- | |
| | | | 216_G19U_s | | | 216_C1A_as | |
| AD- | UAGUCUUGUU | 201 | NM_ | ACUUUGUCAA | 611 | NM_ | 199-217 |
| 960679 | UGACAAAGU | | 001028.3_199- | ACAAGACUA | | 001028.3_199- | |
| | | | 217_C19U_s | | | 217_G1A_as | |
| AD- | AGUCUUGUUU | 202 | NM_ | AGCUUUGUCA | 612 | NM_ | 200-218 |
| 960680 | GACAAAGCU | | 001028.3_200- | AACAAGACU | | 001028.3_200- | |
| | | | 218_s | | | 218_as | |
| AD- | GUCUUGUUUG | 203 | NM_ | AAGCUUUGUC | 613 | NM_ | 201-219 |
| 960681 | ACAAAGCUU | | 001028.3_201- | AAACAAGAC | | 001028.3_201- | |
| | | | 219_A19U_s | | | 219_U1A_as | |
| AD- | UCUUGUUUGA | 204 | NM_ | AUAGCUUUGU | 614 | NM_ | 202-220 |
| 960682 | CAAAGCUAU | | 001028.3_202- | CAAACAAGA | | 001028.3_202- | |
| | | | 220_C19U_s | | | 220_G1A_as | |
| AD- | CUUGUUUGAC | 205 | NM_ | AGUAGCUUUG | 615 | NM_ | 203-221 |
| 960683 | AAAGCUACU | | 001028.3_203- | UCAAACAAG | | 001028.3_203- | |
| | | | 221_C19U_s | | | 221_G1A_as | |
| AD- | UUGUUUGACA | 206 | NM_ | AGGUAGCUUU | 616 | NM_ | 204-222 |
| 960684 | AAGCUACCU | | 001028.3_204- | GUCAAACAA | | 001028.3_204- | |
| | | | 222_s | | | 222_as | |
| AD- | UGUUUGACAA | 207 | NM_ | AAGGUAGCUU | 617 | NM_ | 205-223 |
| 960685 | AGCUACCUU | | 001028.3_205- | UGUCAAACA | | 001028.3_205- | |
| | | | 223_A19U_s | | | 223_U1A_as | |
| AD- | GUUUGACAAA | 208 | NM_ | AUAGGUAGCU | 618 | NM_ | 206-224 |
| 960686 | GCUACCUAU | | 001028.3_206- | UUGUCAAAC | | 001028.3_206- | |
| | | | 224_s | | | 224_as | |
| AD- | UUUGACAAAG | 209 | NM_ | AAUAGGUAGC | 619 | NM_ | 207-225 |
| 960687 | CUACCUAUU | | 001028.3_207- | UUUGUCAAA | | 001028.3_207- | |
| | | | 225_G19U_s | | | 225_C1A_as | |
| AD- | UUGACAAAGC | 210 | NM_ | ACAUAGGUAG | 620 | NM_ | 208-226 |
| 960688 | UACCUAUGU | | 001028.3_208- | CUUUGUCAA | | 001028.3_208- | |
| | | | 226_A19U_s | | | 226_U1A_as | |
| AD- | UGACAAAGCU | 211 | NM_ | AUCAUAGGUA | 621 | NM_ | 209-227 |
| 960689 | ACCUAUGAU | | 001028.3_209- | GCUUUGUCA | | 001028.3_209- | |
| | | | 227_s | | | 227_as | |
| AD- | GACAAAGCUA | 212 | NM_ | AAUCAUAGGU | 622 | NM_ | 210-228 |
| 960690 | CCUAUGAUU | | 001028.3_210- | AGCUUUGUC | | 001028.3_210- | |
| | | | 228_A19U_s | | | 228_U1A_as | |
| AD- | ACAAAGCUAC | 213 | NM_ | AUAUCAUAGG | 623 | NM_ | 211-229 |
| 960691 | CUAUGAUAU | | 001028.3_211- | UAGCUUUGU | | 001028.3_211- | |
| | | | 229_A19U_s | | | 229_U1A_as | |
| AD- | CAAAGCUACC | 214 | NM_ | AUUAUCAUAG | 624 | NM_ | 212-230 |
| 960692 | UAUGAUAAU | | 001028.3_212- | GUAGCUUUG | | 001028.3_212- | |
| | | | 230_A19U_s | | | 230_U1A_as | |
| AD- | AAAGCUACCU | 215 | NM_ | AUUUAUCAUA | 625 | NM_ | 213-231 |
| 960693 | AUGAUAAAU | | 001028.3_213- | GGUAGCUUU | | 001028.3_213- | |
| | | | 231_C19U_s | | | 231_G1A_as | |
| AD- | AAGCUACCUA | 216 | NM_ | AGUUUAUCAU | 626 | NM_ | 214-232 |
| 960694 | UGAUAAACU | | 001028.3_214- | AGGUAGCUU | | 001028.3_214- | |
| | | | 232_s | | | 232_as | |
| AD- | AGCUACCUAU | 217 | NM_ | AAGUUUAUCA | 627 | NM_ | 215-233 |
| 960695 | GAUAAACUU | | 001028.3_215- | UAGGUAGCU | | 001028.3_215- | |
| | | | 233_C19U_s | | | 233_G1A_as | |
| AD- | GCUACCUAUG | 218 | NM_ | AGAGUUUAUC | 628 | NM_ | 216-234 |
| 960696 | AUAAACUCU | | 001028.3_216- | AUAGGUAGC | | 001028.3_216- | |
| | | | 234_s | | | 234_as | |
| AD- | CUACCUAUGA | 219 | NM_ | AAGAGUUUAU | 629 | NM_ | 217-235 |
| 960697 | UAAACUCUU | | 001028.3_217- | CAUAGGUAG | | 001028.3_217- | |
| | | | 235_G19U_s | | | 235_C1A_as | |
| AD- | UACCUAUGAU | 220 | NM_ | ACAGAGUUUA | 630 | NM_ | 218-236 |
| 960698 | AAACUCUGU | | 001028.3_218- | UCAUAGGUA | | 001028.3_218- | |
| | | | 236_s | | | 236_as | |
| AD- | ACCUAUGAUA | 221 | NM_ | AACAGAGUUU | 631 | NM_ | 219-237 |
| 960699 | AACUCUGUU | | 001028.3_219- | AUCAUAGGU | | 001028.3_219- | |
| | | | 237_A19U_s | | | 237_U1A_as | |
| AD- | CCUAUGAUAA | 222 | NM_ | AUACAGAGUU | 632 | NM_ | 220-238 |
| 960700 | ACUCUGUAU | | 001028.3_220- | UAUCAUAGG | | 001028.3_220- | |
| | | | 238_A19U_s | | | 238_U1A_as | |
| AD- | CUAUGAUAAA | 223 | NM_ | AUUACAGAGU | 633 | NM_ | 221-239 |
| 960701 | CUCUGUAAU | | 001028.3_221- | UUAUCAUAG | | 001028.3_221- | |
| | | | 239_G19U_s | | | 239_C1A_as | |
| AD- | UAUGAUAAAC | 224 | NM_ | ACUUACAGAG | 634 | NM_ | 222-240 |
| 960702 | UCUGUAAGU | | 001028.3_222- | UUUAUCAUA | | 001028.3_222- | |
| | | | 240_G19U_s | | | 240_C1A_as | |
| AD- | AUGAUAAACU | 225 | NM_ | ACCUUACAGA | 635 | NM_ | 223-241 |
| 960703 | CUGUAAGGU | | 001028.3_223- | GUUUAUCAU | | 001028.3_223- | |
| | | | 241_A19U_s | | | 241_U1A_as | |
| AD- | UGAUAAACUC | 226 | NM_ | AUCCUUACAG | 636 | NM_ | 224-242 |
| 960704 | UGUAAGGAU | | 001028.3_224- | AGUUUAUCA | | 001028.3_224- | |
| | | | 242_A19U_s | | | 242_U1A_as | |
| AD- | GAUAAACUCU | 227 | NM_ | AUUCCUUACA | 637 | NM_ | 225-243 |
| 960705 | GUAAGGAAU | | 001028.3_225- | GAGUUUAUC | | 001028.3_225- | |
| | | | 243_G19U_s | | | 243_C1A_as | |
| AD- | AUAAACUCUG | 228 | NM_ | ACUUCCUUAC | 638 | NM_ | 226-244 |
| 960706 | UAAGGAAGU | | 001028.3_226- | AGAGUUUAU | | 001028.3_226- | |
| | | | 244_s | | | 244_as | |
| AD- | UAAACUCUGU | 229 | NM_ | AACUUCCUUA | 639 | NM_ | 227-245 |
| 960707 | AAGGAAGUU | | 001028.3_227- | CAGAGUUUA | | 001028.3_227- | |
| | | | 245_s | | | 245_as | |
| AD- | AAACUCUGUA | 230 | NM_ | AAACUUCCUU | 640 | NM_ | 228-246 |
| 960708 | AGGAAGUUU | | 001028.3_228- | ACAGAGUUU | | 001028.3_228- | |
| | | | 246_C19U_s | | | 246_G1A_as | |
| AD- | AACUCUGUAA | 231 | NM_ | AGAACUUCCU | 641 | NM_ | 229-247 |
| 960709 | GGAAGUUCU | | 001028.3_229- | UACAGAGUU | | 001028.3_229- | |
| | | | 247_C19U_s | | | 247_G1A_as | |
| AD- | ACUCUGUAAG | 232 | NM_ | AGGAACUUCC | 642 | NM_ | 230-248 |
| 960710 | GAAGUUCCU | | 001028.3_230- | UUACAGAGU | | 001028.3_230- | |
| | | | 248_C19U_s | | | 248_G1A_as | |
| AD- | CUCUGUAAGG | 233 | NM_ | AGGGAACUUC | 643 | NM_ | 231-249 |
| 960711 | AAGUUCCCU | | 001028.3_231- | CUUACAGAG | | 001028.3_231- | |
| | | | 249_A19U_s | | | 249_U1A_as | |
| AD- | UCUGUAAGGA | 234 | NM_ | AUGGGAACUU | 644 | NM_ | 232-250 |
| 960712 | AGUUCCCAU | | 001028.3_232- | CCUUACAGA | | 001028.3_232- | |
| | | | 250_A19U_s | | | 250_U1A_as | |
| AD- | CUGUAAGGAA | 235 | NM_ | AUUGGGAACU | 645 | NM_ | 233-251 |
| 960713 | GUUCCCAAU | | 001028.3_233- | UCCUUACAG | | 001028.3_233- | |
| | | | 251_C19U_s | | | 251_G1A_as | |
| AD- | UGUAAGGAAG | 236 | NM_ | AGUUGGGAAC | 646 | NM_ | 234-252 |
| 960714 | UUCCCAACU | | 001028.3_234- | UUCCUUACA | | 001028.3_234- | |
| | | | 252_s | | | 252_as | |
| AD- | GUAAGGAAGU | 237 | NM_ | AAGUUGGGAA | 647 | NM_ | 235-253 |
| 960715 | UCCCAACUU | | 001028.3_235- | CUUCCUUAC | | 001028.3_235- | |
| | | | 253_A19U_s | | | 253_U1A_as | |
| AD- | UAAGGAAGUU | 238 | NM_ | AUAGUUGGGA | 648 | NM_ | 236-254 |
| 960716 | CCCAACUAU | | 001028.3_236- | ACUUCCUUA | | 001028.3_236- | |
| | | | 254_s | | | 254_as | |
| AD- | AAGGAAGUUC | 239 | NM_ | AAUAGUUGGG | 649 | NM_ | 237-255 |
| 960717 | CCAACUAUU | | 001028.3_237- | AACUUCCUU | | 001028.3_237- | |
| | | | 255_A19U_s | | | 255_U1A_as | |
| AD- | AGGAAGUUCC | 240 | NM_ | AUAUAGUUGG | 650 | NM_ | 238-256 |
| 960718 | CAACUAUAU | | 001028.3_238- | GAACUUCCU | | 001028.3_238- | |
| | | | 256_A19U_s | | | 256_U1A_as | |
| AD- | GGAAGUUCCC | 241 | NM_ | AUUAUAGUUG | 651 | NM_ | 239-257 |
| 960719 | AACUAUAAU | | 001028.3_239- | GGAACUUCC | | 001028.3_239- | |
| | | | 257_A19U_s | | | 257_U1A_as | |
| AD- | GAAGUUCCCA | 242 | NM_ | AUUUAUAGUU | 652 | NM_ | 240-258 |
| 960720 | ACUAUAAAU | | 001028.3_240- | GGGAACUUC | | 001028.3_240- | |
| | | | 258_C19U_s | | | 258_G1A_as | |
| AD- | AAGUUCCCAA | 243 | NM_ | AGUUUAUAGU | 653 | NM_ | 241-259 |
| 960721 | CUAUAAACU | | 001028.3_241- | UGGGAACUU | | 001028.3_241- | |
| | | | 259_s | | | 259_as | |
| AD- | AGUUCCCAAC | 244 | NM_ | AAGUUUAUAG | 654 | NM_ | 242-260 |
| 960722 | UAUAAACUU | | 001028.3_242- | UUGGGAACU | | 001028.3_242- | |
| | | | 260_s | | | 260_as | |
| AD- | GUUCCCAACU | 245 | NM_ | AAAGUUUAUA | 655 | NM_ | 243-261 |
| 960723 | AUAAACUUU | | 001028.3_243- | GUUGGGAAC | | 001028.3_243- | |
| | | | 261_A19U_s | | | 261_U1A_as | |
| AD- | UUCCCAACUA | 246 | NM_ | AUAAGUUUAU | 656 | NM_ | 244-262 |
| 960724 | UAAACUUAU | | 001028.3_244- | AGUUGGGAA | | 001028.3_244- | |
| | | | 262_s | | | 262_as | |
| AD- | UCCCAACUAU | 247 | NM_ | AAUAAGUUUA | 657 | NM_ | 245-263 |
| 960725 | AAACUUAUU | | 001028.3_245- | UAGUUGGGA | | 001028.3_245- | |
| | | | 263_A19U_s | | | 263_U1A_as | |
| AD- | CCCAACUAUA | 248 | NM_ | AUAUAAGUUU | 658 | NM_ | 246-264 |
| 960726 | AACUUAUAU | | 001028.3_246- | AUAGUUGGG | | 001028.3_246- | |
| | | | 264_A19U_s | | | 264_U1A_as | |
| AD- | CCAACUAUAA | 249 | NM_ | AUUAUAAGUU | 659 | NM_ | 247-265 |
| 960727 | ACUUAUAAU | | 001028.3_247- | UAUAGUUGG | | 001028.3_247- | |
| | | | 265_C19U_s | | | 265_G1A_as | |
| AD- | CAACUAUAAA | 250 | NM_ | AGUUAUAAGU | 660 | NM_ | 248-266 |
| 960728 | CUUAUAACU | | 001028.3_248- | UUAUAGUUG | | 001028.3_248- | |
| | | | 266_C19U_s | | | 266_G1A_as | |
| AD- | AACUAUAAAC | 251 | NM_ | AGGUUAUAAG | 661 | NM_ | 249-267 |
| 960729 | UUAUAACCU | | 001028.3_249- | UUUAUAGUU | | 001028.3_249- | |
| | | | 267_C19U_s | | | 267_G1A_as | |
| AD- | CCCAGCUGUG | 252 | NM_ | AUCAGAGACC | 662 | NM_ | 266-284 |
| 960730 | GUCUCUGAU | | 001028.3_266- | ACAGCUGGG | | 001028.3_266- | |
| | | | 284_G19U_s | | | 284_C1A_as | |
| AD- | CCAGCUGUGG | 253 | NM_ | ACUCAGAGAC | 663 | NM_ | 267-285 |
| 960731 | UCUCUGAGU | | 001028.3_267- | CACAGCUGG | | 001028.3_267- | |
| | | | 285_A19U_s | | | 285_U1A_as | |
| AD- | CAGCUGUGGU | 254 | NM_ | AUCUCAGAGA | 664 | NM_ | 268-286 |
| 960732 | CUCUGAGAU | | 001028.3_268- | CCACAGCUG | | 001028.3_268- | |
| | | | 286_G19U_s | | | 286_C1A_as | |
| AD- | AGCUGUGGUC | 255 | NM_ | ACUCUCAGAG | 665 | NM_ | 269-287 |
| 960733 | UCUGAGAGU | | 001028.3_269- | ACCACAGCU | | 001028.3_269- | |
| | | | 287_A19U_s | | | 287_U1A_as | |
| AD- | GCUGUGGUCU | 256 | NM_ | AUCUCUCAGA | 666 | NM_ | 270-288 |
| 960734 | CUGAGAGAU | | 001028.3_270- | GACCACAGC | | 001028.3_270- | |
| | | | 288_C19U_s | | | 288_G1A_as | |
| AD- | CUGUGGUCUC | 257 | NM_ | AGUCUCUCAG | 667 | NM_ | 271-289 |
| 960735 | UGAGAGACU | | 001028.3_271- | AGACCACAG | | 001028.3_271- | |
| | | | 289_s | | | 289_as | |
| AD- | UGUGGUCUCU | 258 | NM_ | AAGUCUCUCA | 668 | NM_ | 272-290 |
| 960736 | GAGAGACUU | | 001028.3_272- | GAGACCACA | | 001028.3_272- | |
| | | | 290_G19U_s | | | 290_C1A_as | |
| AD- | GUGGUCUCUG | 259 | NM_ | ACAGUCUCUC | 669 | NM_ | 273-291 |
| 960737 | AGAGACUGU | | 001028.3_273- | AGAGACCAC | | 001028.3_273- | |
| | | | 291_A19U_s | | | 291_U1A_as | |
| AD- | UGGUCUCUGA | 260 | NM_ | AUCAGUCUCU | 670 | NM_ | 274-292 |
| 960738 | GAGACUGAU | | 001028.3_274- | CAGAGACCA | | 001028.3_274- | |
| | | | 292_A19U_s | | | 292_U1A_as | |
| AD- | GGUCUCUGAG | 261 | NM_ | AUUCAGUCUC | 671 | NM_ | 275-293 |
| 960739 | AGACUGAAU | | 001028.3_275- | UCAGAGACC | | 001028.3_275- | |
| | | | 293_G19U_s | | | 293_C1A_as | |
| AD- | GUCUCUGAGA | 262 | NM_ | ACUUCAGUCU | 672 | NM_ | 276-294 |
| 960740 | GACUGAAGU | | 001028.3_276- | CUCAGAGAC | | 001028.3_276- | |
| | | | 294_A19U_s | | | 294_U1A_as | |
| AD- | UCUCUGAGAG | 263 | NM_ | AUCUUCAGUC | 673 | NM_ | 277-295 |
| 960741 | ACUGAAGAU | | 001028.3_277- | UCUCAGAGA | | 001028.3_277- | |
| | | | 295_s | | | 295_as | |
| AD- | CUCUGAGAGA | 264 | NM_ | AAUCUUCAGU | 674 | NM_ | 278-296 |
| 960742 | CUGAAGAUU | | 001028.3_278- | CUCUCAGAG | | 001028.3_278- | |
| | | | 296_s | | | 296_as | |
| AD- | UCUGAGAGAC | 265 | NM_ | AAAUCUUCAG | 675 | NM_ | 279-297 |
| 960743 | UGAAGAUUU | | 001028.3_279- | UCUCUCAGA | | 001028.3_279- | |
| | | | 297_C19U_s | | | 297_G1A_as | |
| AD- | CUGAGAGACU | 266 | NM_ | AGAAUCUUCA | 676 | NM_ | 280-298 |
| 960744 | GAAGAUUCU | | 001028.3_280- | GUCUCUCAG | | 001028.3_280- | |
| | | | 298_G19U_s | | | 298_C1A_as | |
| AD- | UGAGAGACUG | 267 | NM_ | ACGAAUCUUC | 677 | NM_ | 281-299 |
| 960745 | AAGAUUCGU | | 001028.3_281- | AGUCUCUCA | | 001028.3_281- | |
| | | | 299_A19U_s | | | 299_U1A_as | |
| AD- | GAGAGACUGA | 268 | NM_ | AUCGAAUCUU | 678 | NM_ | 282-300 |
| 960746 | AGAUUCGAU | | 001028.3_282- | CAGUCUCUC | | 001028.3_282- | |
| | | | 300_G19U_s | | | 300_C1A_as | |
| AD- | AGAGACUGAA | 269 | NM_ | ACUCGAAUCU | 679 | NM_ | 283-301 |
| 960747 | GAUUCGAGU | | 001028.3_283- | UCAGUCUCU | | 001028.3_283- | |
| | | | 301_G19U_s | | | 301_C1A_as | |
| AD- | GAGACUGAAG | 270 | NM_ | ACCUCGAAUC | 680 | NM_ | 284-302 |
| 960748 | AUUCGAGGU | | 001028.3_284- | UUCAGUCUC | | 001028.3_284- | |
| | | | 302_C19U_s | | | 302_G1A_as | |
| AD- | AGACUGAAGA | 271 | NM_ | AGCCUCGAAU | 681 | NM_ | 285-303 |
| 960749 | UUCGAGGCU | | 001028.3_285- | CUUCAGUCU | | 001028.3_285- | |
| | | | 303_s | | | 303_as | |
| AD- | GACUGAAGAU | 272 | NM_ | AAGCCUCGAA | 682 | NM_ | 286-304 |
| 960750 | UCGAGGCUU | | 001028.3_286- | UCUUCAGUC | | 001028.3_286- | |
| | | | 304_C19U_s | | | 304_G1A_as | |
| AD- | ACUGAAGAUU | 273 | NM_ | AGAGCCUCGA | 683 | NM_ | 287-305 |
| 960751 | CGAGGCUCU | | 001028.3_287- | AUCUUCAGU | | 001028.3_287- | |
| | | | 305_C19U_s | | | 305_G1A_as | |
| AD- | CUGAAGAUUC | 274 | NM_ | AGGAGCCUCG | 684 | NM_ | 288-306 |
| 960752 | GAGGCUCCU | | 001028.3_288- | AAUCUUCAG | | 001028.3_288- | |
| | | | 306_C19U_s | | | 306_G1A_as | |
| AD- | UGAAGAUUCG | 275 | NM_ | AGGGAGCCUC | 685 | NM_ | 289-307 |
| 960753 | AGGCUCCCU | | 001028.3_289- | GAAUCUUCA | | 001028.3_289- | |
| | | | 307_s | | | 307_as | |
| AD- | GAAGAUUCGA | 276 | NM_ | AAGGGAGCCU | 686 | NM_ | 290-308 |
| 960754 | GGCUCCCUU | | 001028.3_290- | CGAAUCUUC | | 001028.3_290- | |
| | | | 308_G19U_s | | | 308_C1A_as | |
| AD- | AAGAUUCGAG | 277 | NM_ | ACAGGGAGCC | 687 | NM_ | 291-309 |
| 960755 | GCUCCCUGU | | 001028.3_291- | UCGAAUCUU | | 001028.3_291- | |
| | | | 309_G19U_s | | | 309_C1A_as | |
| AD- | AGAUUCGAGG | 278 | NM_ | ACCAGGGAGC | 688 | NM_ | 292-310 |
| 960756 | CUCCCUGGU | | 001028.3_292- | CUCGAAUCU | | 001028.3_292- | |
| | | | 310_C19U_s | | | 310_G1A_as | |
| AD- | GAUUCGAGGC | 279 | NM_ | AGCCAGGGAG | 689 | NM_ | 293-311 |
| 960757 | UCCCUGGCU | | 001028.3_293- | CCUCGAAUC | | 001028.3_293- | |
| | | | 311_C19U_s | | | 311_G1A_as | |
| AD- | AUUCGAGGCU | 280 | NM_ | AGGCCAGGGA | 690 | NM_ | 294-312 |
| 960758 | CCCUGGCCU | | 001028.3_294- | GCCUCGAAU | | 001028.3_294- | |
| | | | 312_A19U_s | | | 312_U1A_as | |
| AD- | UUCGAGGCUC | 281 | NM_ | AUGGCCAGGG | 691 | NM_ | 295-313 |
| 960759 | CCUGGCCAU | | 001028.3_295- | AGCCUCGAA | | 001028.3_295- | |
| | | | 313_G19U_s | | | 313_C1A_as | |
| AD- | UCGAGGCUCC | 282 | NM_ | ACUGGCCAGG | 692 | NM_ | 296-314 |
| 960760 | CUGGCCAGU | | 001028.3_296- | GAGCCUCGA | | 001028.3_296- | |
| | | | 314_G19U_s | | | 314_C1A_as | |
| AD- | CUGGCCAGGG | 283 | NM_ | AAAGGGCUGC | 693 | NM_ | 306-324 |
| 960761 | CAGCCCUUU | | 001028.3_306- | CCUGGCCAG | | 001028.3_306- | |
| | | | 324_C19U_s | | | 324_G1A_as | |
| AD- | UGGCCAGGGC | 284 | NM_ | AGAAGGGCUG | 694 | NM_ | 307-325 |
| 960762 | AGCCCUUCU | | 001028.3_307- | CCCUGGCCA | | 001028.3_307- | |
| | | | 325_A19U_s | | | 325_U1A_as | |
| AD- | GGCCAGGGCA | 285 | NM_ | AUGAAGGGCU | 695 | NM_ | 308-326 |
| 960763 | GCCCUUCAU | | 001028.3_308- | GCCCUGGCC | | 001028.3_308- | |
| | | | 326_G19U_s | | | 326_C1A_as | |
| AD- | GCCAGGGCAG | 286 | NM_ | ACUGAAGGGC | 696 | NM_ | 309-327 |
| 960764 | CCCUUCAGU | | 001028.3_309- | UGCCCUGGC | | 001028.3_309- | |
| | | | 327_G19U_s | | | 327_C1A_as | |
| AD- | CCAGGGCAGC | 287 | NM_ | ACCUGAAGGG | 697 | NM_ | 310-328 |
| 960765 | CCUUCAGGU | | 001028.3_310- | CUGCCCUGG | | 001028.3_310- | |
| | | | 328_A19U_s | | | 328_U1A_as | |
| AD- | CAGGGCAGCC | 288 | NM_ | AUCCUGAAGG | 698 | NM_ | 311-329 |
| 960766 | CUUCAGGAU | | 001028.3_311- | GCUGCCCUG | | 001028.3_311- | |
| | | | 329_G19U_s | | | 329_C1A_as | |
| AD- | AGGGCAGCCC | 289 | NM_ | ACUCCUGAAG | 699 | NM_ | 312-330 |
| 960767 | UUCAGGAGU | | 001028.3_312- | GGCUGCCCU | | 001028.3_312- | |
| | | | 330_C19U_s | | | 330_G1A_as | |
| AD- | GGGCAGCCCU | 290 | NM_ | AGCUCCUGAA | 700 | NM_ | 313-331 |
| 960768 | UCAGGAGCU | | 001028.3_313- | GGGCUGCCC | | 001028.3_313- | |
| | | | 331_s | | | 331_as | |
| AD- | GGCAGCCCUU | 291 | NM_ | AAGCUCCUGA | 701 | NM_ | 314-332 |
| 960769 | CAGGAGCUU | | 001028.3_314- | AGGGCUGCC | | 001028.3_314- | |
| | | | 332_C19U_s | | | 332_G1A_as | |
| AD- | GCAGCCCUUC | 292 | NM_ | AGAGCUCCUG | 702 | NM_ | 315-333 |
| 960770 | AGGAGCUCU | | 001028.3_315- | AAGGGCUGC | | 001028.3_315- | |
| | | | 333_C19U_s | | | 333_G1A_as | |
| AD- | CAGCCCUUCA | 293 | NM_ | AGGAGCUCCU | 703 | NM_ | 316-334 |
| 960771 | GGAGCUCCU | | 001028.3_316- | GAAGGGCUG | | 001028.3_316- | |
| | | | 334_s | | | 334_as | |
| AD- | AGCCCUUCAG | 294 | NM_ | AAGGAGCUCC | 704 | NM_ | 317-335 |
| 960772 | GAGCUCCUU | | 001028.3_317- | UGAAGGGCU | | 001028.3_317- | |
| | | | 335_s | | | 335_as | |
| AD- | GCCCUUCAGG | 295 | NM_ | AAAGGAGCUC | 705 | NM_ | 318-336 |
| 960773 | AGCUCCUUU | | 001028.3_318- | CUGAAGGGC | | 001028.3_318- | |
| | | | 336_A19U_s | | | 336_U1A_as | |
| AD- | CCCUUCAGGA | 296 | NM_ | AUAAGGAGCU | 706 | NM_ | 319-337 |
| 960774 | GCUCCUUAU | | 001028.3_319- | CCUGAAGGG | | 001028.3_319- | |
| | | | 337_G19U_s | | | 337_C1A_as | |
| AD- | CCUUCAGGAG | 297 | NM_ | ACUAAGGAGC | 707 | NM_ | 320-338 |
| 960775 | CUCCUUAGU | | 001028.3_320- | UCCUGAAGG | | 001028.3_320- | |
| | | | 338_s | | | 338_as | |
| AD- | CUUCAGGAGC | 298 | NM_ | AACUAAGGAG | 708 | NM_ | 321-339 |
| 960776 | UCCUUAGUU | | 001028.3_321- | CUCCUGAAG | | 001028.3_321- | |
| | | | 339_A19U_s | | | 339_U1A_as | |
| AD- | UUCAGGAGCU | 299 | NM_ | AUACUAAGGA | 709 | NM_ | 322-340 |
| 960777 | CCUUAGUAU | | 001028.3_322- | GCUCCUGAA | | 001028.3_322- | |
| | | | 340_A19U_s | | | 340_U1A_as | |
| AD- | UCAGGAGCUC | 300 | NM_ | AUUACUAAGG | 710 | NM_ | 323-341 |
| 960778 | CUUAGUAAU | | 001028.3_323- | AGCUCCUGA | | 001028.3_323- | |
| | | | 341_A19U_s | | | 341_U1A_as | |
| AD- | CAGGAGCUCC | 301 | NM_ | AUUUACUAAG | 711 | NM_ | 324-342 |
| 960779 | UUAGUAAAU | | 001028.3_324- | GAGCUCCUG | | 001028.3_324- | |
| | | | 342_G19U_s | | | 342_C1A_as | |
| AD- | AGGAGCUCCU | 302 | NM_ | ACUUUACUAA | 712 | NM_ | 325-343 |
| 960780 | UAGUAAAGU | | 001028.3_325- | GGAGCUCCU | | 001028.3_325- | |
| | | | 343_G19U_s | | | 343_C1A_as | |
| AD- | GGAGCUCCUU | 303 | NM_ | ACCUUUACUA | 713 | NM_ | 326-344 |
| 960781 | AGUAAAGGU | | 001028.3_326- | AGGAGCUCC | | 001028.3_326- | |
| | | | 344_A19U_s | | | 344_U1A_as | |
| AD- | GAGCUCCUUA | 304 | NM_ | AUCCUUUACU | 714 | NM_ | 327-345 |
| 960782 | GUAAAGGAU | | 001028.3_327- | AAGGAGCUC | | 001028.3_327- | |
| | | | 345_C19U_s | | | 345_G1A_as | |
| AD- | AGCUCCUUAG | 305 | NM_ | AGUCCUUUAC | 715 | NM_ | 328-346 |
| 960783 | UAAAGGACU | | 001028.3_328- | UAAGGAGCU | | 001028.3_328- | |
| | | | 346_s | | | 346_as | |
| AD- | GCUCCUUAGU | 306 | NM_ | AAGUCCUUUA | 716 | NM_ | 329-347 |
| 960784 | AAAGGACUU | | 001028.3_329- | CUAAGGAGC | | 001028.3_329- | |
| | | | 347_s | | | 347_as | |
| AD- | CUCCUUAGUA | 307 | NM_ | AAAGUCCUUU | 717 | NM_ | 330-348 |
| 960785 | AAGGACUUU | | 001028.3_330- | ACUAAGGAG | | 001028.3_330- | |
| | | | 348_A19U_s | | | 348_U1A_as | |
| AD- | UCCUUAGUAA | 308 | NM_ | AUAAGUCCUU | 718 | NM_ | 331-349 |
| 960786 | AGGACUUAU | | 001028.3_331- | UACUAAGGA | | 001028.3_331- | |
| | | | 349_s | | | 349_as | |
| AD- | CCUUAGUAAA | 309 | NM_ | AAUAAGUCCU | 719 | NM_ | 332-350 |
| 960787 | GGACUUAUU | | 001028.3_332- | UUACUAAGG | | 001028.3_332- | |
| | | | 350_C19U_s | | | 350_G1A_as | |
| AD- | CUUAGUAAAG | 310 | NM_ | AGAUAAGUCC | 720 | NM_ | 333-351 |
| 960788 | GACUUAUCU | | 001028.3_333- | UUUACUAAG | | 001028.3_333- | |
| | | | 351_A19U_s | | | 351_U1A_as | |
| AD- | UUAGUAAAGG | 311 | NM_ | AUGAUAAGUC | 721 | NM_ | 334-352 |
| 960789 | ACUUAUCAU | | 001028.3_334- | CUUUACUAA | | 001028.3_334- | |
| | | | 352_A19U_s | | | 352_U1A_as | |
| AD- | UAGUAAAGGA | 312 | NM_ | AUUGAUAAGU | 722 | NM_ | 335-353 |
| 960790 | CUUAUCAAU | | 001028.3_335- | CCUUUACUA | | 001028.3_335- | |
| | | | 353_A19U_s | | | 353_U1A_as | |
| AD- | AGUAAAGGAC | 313 | NM_ | AUUUGAUAAG | 723 | NM_ | 336-354 |
| 960791 | UUAUCAAAU | | 001028.3_336- | UCCUUUACU | | 001028.3_336- | |
| | | | 354_C19U_s | | | 354_G1A_as | |
| AD- | GUAAAGGACU | 314 | NM_ | AGUUUGAUAA | 724 | NM_ | 337-355 |
| 960792 | UAUCAAACU | | 001028.3_337- | GUCCUUUAC | | 001028.3_337- | |
| | | | 355_s | | | 355_as | |
| AD- | UAAAGGACUU | 315 | NM_ | AAGUUUGAUA | 725 | NM_ | 338-356 |
| 960793 | AUCAAACUU | | 001028.3_338- | AGUCCUUUA | | 001028.3_338- | |
| | | | 356_G19U_s | | | 356_C1A_as | |
| AD- | AAAGGACUUA | 316 | NM_ | ACAGUUUGAU | 726 | NM_ | 339-357 |
| 960794 | UCAAACUGU | | 001028.3_339- | AAGUCCUUU | | 001028.3_339- | |
| | | | 357_G19U_s | | | 357_C1A_as | |
| AD- | AAGGACUUAU | 317 | NM_ | ACCAGUUUGA | 727 | NM_ | 340-358 |
| 960795 | CAAACUGGU | | 001028.3_340- | UAAGUCCUU | | 001028.3_340- | |
| | | | 358_s | | | 358_as | |
| AD- | AGGACUUAUC | 318 | NM_ | AACCAGUUUG | 728 | NM_ | 341-359 |
| 960796 | AAACUGGUU | | 001028.3_341- | AUAAGUCCU | | 001028.3_341- | |
| | | | 359_s | | | 359_as | |
| AD- | GGACUUAUCA | 319 | NM_ | AAACCAGUUU | 729 | NM_ | 342-360 |
| 960797 | AACUGGUUU | | 001028.3_342- | GAUAAGUCC | | 001028.3_342- | |
| | | | 360_s | | | 360_as | |
| AD- | GACUUAUCAA | 320 | NM_ | AAAACCAGUU | 730 | NM_ | 343-361 |
| 960798 | ACUGGUUUU | | 001028.3_343- | UGAUAAGUC | | 001028.3_343- | |
| | | | 361_C19U_s | | | 361_G1A_as | |
| AD- | ACUUAUCAAA | 321 | NM_ | AGAAACCAGU | 731 | NM_ | 344-362 |
| 960799 | CUGGUUUCU | | 001028.3_344- | UUGAUAAGU | | 001028.3_344- | |
| | | | 362_A19U_s | | | 362_U1A_as | |
| AD- | CUUAUCAAAC | 322 | NM_ | AUGAAACCAG | 732 | NM_ | 345-363 |
| 960800 | UGGUUUCAU | | 001028.3_345- | UUUGAUAAG | | 001028.3_345- | |
| | | | 363_A19U_s | | | 363_U1A_as | |
| AD- | UUAUCAAACU | 323 | NM_ | AUUGAAACCA | 733 | NM_ | 346-364 |
| 960801 | GGUUUCAAU | | 001028.3_346- | GUUUGAUAA | | 001028.3_346- | |
| | | | 364_A19U_s | | | 364_U1A_as | |
| AD- | UAUCAAACUG | 324 | NM_ | AUUUGAAACC | 734 | NM_ | 347-365 |
| 960802 | GUUUCAAAU | | 001028.3_347- | AGUUUGAUA | | 001028.3_347- | |
| | | | 365_G19U_s | | | 365_C1A_as | |
| AD- | AUCAAACUGG | 325 | NM_ | ACUUUGAAAC | 735 | NM_ | 348-366 |
| 960803 | UUUCAAAGU | | 001028.3_348- | CAGUUUGAU | | 001028.3_348- | |
| | | | 366_C19U_s | | | 366_G1A_as | |
| AD- | UCAAACUGGU | 326 | NM_ | AGCUUUGAAA | 736 | NM_ | 349-367 |
| 960804 | UUCAAAGCU | | 001028.3_349- | CCAGUUUGA | | 001028.3_349- | |
| | | | 367_A19U_s | | | 367_U1A_as | |
| AD- | CAAACUGGUU | 327 | NM_ | AUGCUUUGAA | 737 | NM_ | 350-368 |
| 960805 | UCAAAGCAU | | 001028.3_350- | ACCAGUUUG | | 001028.3_350- | |
| | | | 368_C19U_s | | | 368_G1A_as | |
| AD- | AAACUGGUUU | 328 | NM_ | AGUGCUUUGA | 738 | NM_ | 351-369 |
| 960806 | CAAAGCACU | | 001028.3_351- | AACCAGUUU | | 001028.3_351- | |
| | | | 369_A19U_s | | | 369_U1A_as | |
| AD- | AACUGGUUUC | 329 | NM_ | AUGUGCUUUG | 739 | NM_ | 352-370 |
| 960807 | AAAGCACAU | | 001028.3_352- | AAACCAGUU | | 001028.3_352- | |
| | | | 370_G19U_s | | | 370_C1A_as | |
| AD- | ACUGGUUUCA | 330 | NM_ | ACUGUGCUUU | 740 | NM_ | 353-371 |
| 960808 | AAGCACAGU | | 001028.3_353- | GAAACCAGU | | 001028.3_353- | |
| | | | 371_A19U_s | | | 371_U1A_as | |
| AD- | CUGGUUUCAA | 331 | NM_ | AUCUGUGCUU | 741 | NM_ | 354-372 |
| 960809 | AGCACAGAU | | 001028.3_354- | UGAAACCAG | | 001028.3_354- | |
| | | | 372_G19U_s | | | 372_C1A_as | |
| AD- | UGGUUUCAAA | 332 | NM_ | ACUCUGUGCU | 742 | NM_ | 355-373 |
| 960810 | GCACAGAGU | | 001028.3_355- | UUGAAACCA | | 001028.3_355- | |
| | | | 373_C19U_s | | | 373_G1A_as | |
| AD- | GGUUUCAAAG | 333 | NM_ | AGCUCUGUGC | 743 | NM_ | 356-374 |
| 960811 | CACAGAGCU | | 001028.3_356- | UUUGAAACC | | 001028.3_356- | |
| | | | 374_s | | | 374_as | |
| AD- | GUUUCAAAGC | 334 | NM_ | AAGCUCUGUG | 744 | NM_ | 357-375 |
| 960812 | ACAGAGCUU | | 001028.3_357- | CUUUGAAAC | | 001028.3_357- | |
| | | | 375_C19U_s | | | 375_G1A_as | |
| AD- | UUUCAAAGCA | 335 | NM_ | AGAGCUCUGU | 745 | NM_ | 358-376 |
| 960813 | CAGAGCUCU | | 001028.3_358- | GCUUUGAAA | | 001028.3_358- | |
| | | | 376_A19U_s | | | 376_U1A_as | |
| AD- | UUCAAAGCAC | 336 | NM_ | AUGAGCUCUG | 746 | NM_ | 359-377 |
| 960814 | AGAGCUCAU | | 001028.3_359- | UGCUUUGAA | | 001028.3_359- | |
| | | | 377_A19U_s | | | 377_U1A_as | |
| AD- | UCAAAGCACA | 337 | NM_ | AUUGAGCUCU | 747 | NM_ | 360-378 |
| 960815 | GAGCUCAAU | | 001028.3_360- | GUGCUUUGA | | 001028.3_360- | |
| | | | 378_G19U_s | | | 378_C1A_as | |
| AD- | CAAAGCACAG | 338 | NM_ | ACUUGAGCUC | 748 | NM_ | 361-379 |
| 960816 | AGCUCAAGU | | 001028.3_361- | UGUGCUUUG | | 001028.3_361- | |
| | | | 379_s | | | 379_as | |
| AD- | AAAGCACAGA | 339 | NM_ | AACUUGAGCU | 749 | NM_ | 362-380 |
| 960817 | GCUCAAGUU | | 001028.3_362- | CUGUGCUUU | | 001028.3_362- | |
| | | | 380_A19U_s | | | 380_U1A_as | |
| AD- | AAGCACAGAG | 340 | NM_ | AUACUUGAGC | 750 | NM_ | 363-381 |
| 960818 | CUCAAGUAU | | 001028.3_363- | UCUGUGCUU | | 001028.3_363- | |
| | | | 381_A19U_s | | | 381_U1A_as | |
| AD- | AGCACAGAGC | 341 | NM_ | AUUACUUGAG | 751 | NM_ | 364-382 |
| 960819 | UCAAGUAAU | | 001028.3_364- | CUCUGUGCU | | 001028.3_364- | |
| | | | 382_s | | | 382_as | |
| AD- | GCACAGAGCU | 342 | NM_ | AAUUACUUGA | 752 | NM_ | 365-383 |
| 960820 | CAAGUAAUU | | 001028.3_365- | GCUCUGUGC | | 001028.3_365- | |
| | | | 383_s | | | 383_as | |
| AD- | CACAGAGCUC | 343 | NM_ | AAAUUACUUG | 753 | NM_ | 366-384 |
| 960821 | AAGUAAUUU | | 001028.3_366- | AGCUCUGUG | | 001028.3_366- | |
| | | | 384_s | | | 384_as | |
| AD- | ACAGAGCUCA | 344 | NM_ | AAAAUUACUU | 754 | NM_ | 367-385 |
| 960822 | AGUAAUUUU | | 001028.3_367- | GAGCUCUGU | | 001028.3_367- | |
| | | | 385_A19U_s | | | 385_U1A_as | |
| AD- | CAGAGCUCAA | 345 | NM_ | AUAAAUUACU | 755 | NM_ | 368-386 |
| 960823 | GUAAUUUAU | | 001028.3_368- | UGAGCUCUG | | 001028.3_368- | |
| | | | 386_C19U_s | | | 386_G1A_as | |
| AD- | AGAGCUCAAG | 346 | NM_ | AGUAAAUUAC | 756 | NM_ | 369-387 |
| 960824 | UAAUUUACU | | 001028.3_369- | UUGAGCUCU | | 001028.3_369- | |
| | | | 387_A19U_s | | | 387_U1A_as | |
| AD- | GAGCUCAAGU | 347 | NM_ | AUGUAAAUUA | 757 | NM_ | 370-388 |
| 960825 | AAUUUACAU | | 001028.3_370- | CUUGAGCUC | | 001028.3_370- | |
| | | | 388_C19U_s | | | 388_G1A_as | |
| AD- | AGCUCAAGUA | 348 | NM_ | AGUGUAAAUU | 758 | NM_ | 371-389 |
| 960826 | AUUUACACU | | 001028.3_371- | ACUUGAGCU | | 001028.3_371- | |
| | | | 389_C19U_s | | | 389_G1A_as | |
| AD- | GCUCAAGUAA | 349 | NM_ | AGGUGUAAAU | 759 | NM_ | 372-390 |
| 960827 | UUUACACCU | | 001028.3_372- | UACUUGAGC | | 001028.3_372- | |
| | | | 390_A19U_s | | | 390_U1A_as | |
| AD- | CUCAAGUAAU | 350 | NM_ | AUGGUGUAAA | 760 | NM_ | 373-391 |
| 960828 | UUACACCAU | | 001028.3_373- | UUACUUGAG | | 001028.3_373- | |
| | | | 391_G19U_s | | | 391_C1A_as | |
| AD- | UCAAGUAAUU | 351 | NM_ | ACUGGUGUAA | 761 | NM_ | 374-392 |
| 960829 | UACACCAGU | | 001028.3_374- | AUUACUUGA | | 001028.3_374- | |
| | | | 392_A19U_s | | | 392_U1A_as | |
| AD- | CAAGUAAUUU | 352 | NM_ | AUCUGGUGUA | 762 | NM_ | 375-393 |
| 960830 | ACACCAGAU | | 001028.3_375- | AAUUACUUG | | 001028.3_375- | |
| | | | 393_A19U_s | | | 393_U1A_as | |
| AD- | AAGUAAUUUA | 353 | NM_ | AUUCUGGUGU | 763 | NM_ | 376-394 |
| 960831 | CACCAGAAU | | 001028.3_376- | AAAUUACUU | | 001028.3_376- | |
| | | | 394_A19U_s | | | 394_U1A_as | |
| AD- | AGUAAUUUAC | 354 | NM_ | AUUUCUGGUG | 764 | NM_ | 377-395 |
| 960832 | ACCAGAAAU | | 001028.3_377- | UAAAUUACU | | 001028.3_377- | |
| | | | 395_s | | | 395_as | |
| AD- | GUAAUUUACA | 355 | NM_ | AAUUUCUGGU | 765 | NM_ | 378-396 |
| 960833 | CCAGAAAUU | | 001028.3_378- | GUAAAUUAC | | 001028.3_378- | |
| | | | 396_A19U_s | | | 396_U1A_as | |
| AD- | UAAUUUACAC | 356 | NM_ | AUAUUUCUGG | 766 | NM_ | 379-397 |
| 960834 | CAGAAAUAU | | 001028.3_379- | UGUAAAUUA | | 001028.3_379- | |
| | | | 397_C19U_s | | | 397_G1A_as | |
| AD- | AAUUUACACC | 357 | NM_ | AGUAUUUCUG | 767 | NM_ | 380-398 |
| 960835 | AGAAAUACU | | 001028.3_380- | GUGUAAAUU | | 001028.3_380- | |
| | | | 398_C19U_s | | | 398_G1A_as | |
| AD- | AUUUACACCA | 358 | NM_ | AGGUAUUUCU | 768 | NM_ | 381-399 |
| 960836 | GAAAUACCU | | 001028.3_381- | GGUGUAAAU | | 001028.3_381- | |
| | | | 399_A19U_s | | | 399_U1A_as | |
| AD- | UUUACACCAG | 359 | NM_ | AUGGUAUUUC | 769 | NM_ | 382-400 |
| 960837 | AAAUACCAU | | 001028.3_382- | UGGUGUAAA | | 001028.3_382- | |
| | | | 400_A19U_s | | | 400_U1A_as | |
| AD- | UUACACCAGA | 360 | NM_ | AUUGGUAUUU | 770 | NM_ | 383-401 |
| 960838 | AAUACCAAU | | 001028.3_383- | CUGGUGUAA | | 001028.3_383- | |
| | | | 401_G19U_s | | | 401_C1A_as | |
| AD- | UACACCAGAA | 361 | NM_ | ACUUGGUAUU | 771 | NM_ | 384-402 |
| 960839 | AUACCAAGU | | 001028.3_384- | UCUGGUGUA | | 001028.3_384- | |
| | | | 402_G19U_s | | | 402_C1A_as | |
| AD- | ACACCAGAAA | 362 | NM_ | ACCUUGGUAU | 772 | NM_ | 385-403 |
| 960840 | UACCAAGGU | | 001028.3_385- | UUCUGGUGU | | 001028.3_385- | |
| | | | 403_G19U_s | | | 403_C1A_as | |
| AD- | CACCAGAAAU | 363 | NM_ | ACCCUUGGUA | 773 | NM_ | 386-404 |
| 960841 | ACCAAGGGU | | 001028.3_386- | UUUCUGGUG | | 001028.3_386- | |
| | | | 404_s | | | 404_as | |
| AD- | ACCAGAAAUA | 364 | NM_ | AACCCUUGGU | 774 | NM_ | 387-405 |
| 960842 | CCAAGGGUU | | 001028.3_387- | AUUUCUGGU | | 001028.3_387- | |
| | | | 405_G19U_s | | | 405_C1A_as | |
| AD- | CCAGAAAUAC | 365 | NM_ | ACACCCUUGG | 775 | NM_ | 388-406 |
| 960843 | CAAGGGUGU | | 001028.3_388- | UAUUUCUGG | | 001028.3_388- | |
| | | | 406_G19U_s | | | 406_C1A_as | |
| AD- | CAGAAAUACC | 366 | NM_ | ACCACCCUUG | 776 | NM_ | 389-407 |
| 960844 | AAGGGUGGU | | 001028.3_389- | GUAUUUCUG | | 001028.3_389- | |
| | | | 407_A19U_s | | | 407_U1A_as | |
| AD- | AGAAAUACCA | 367 | NM_ | AUCCACCCUU | 777 | NM_ | 390-408 |
| 960845 | AGGGUGGAU | | 001028.3_390- | GGUAUUUCU | | 001028.3_390- | |
| | | | 408_G19U_s | | | 408_C1A_as | |
| AD- | GAAAUACCAA | 368 | NM_ | ACUCCACCCU | 778 | NM_ | 391-409 |
| 960846 | GGGUGGAGU | | 001028.3_391- | UGGUAUUUC | | 001028.3_391- | |
| | | | 409_A19U_s | | | 409_U1A_as | |
| AD- | AAAUACCAAG | 369 | NM_ | AUCUCCACCC | 779 | NM_ | 392-410 |
| 960847 | GGUGGAGAU | | 001028.3_392- | UUGGUAUUU | | 001028.3_392- | |
| | | | 410_s | | | 410_as | |
| AD- | AAUACCAAGG | 370 | NM_ | AAUCUCCACC | 780 | NM_ | 393-411 |
| 960848 | GUGGAGAUU | | 001028.3_393- | CUUGGUAUU | | 001028.3_393- | |
| | | | 411_G19U_s | | | 411_C1A_as | |
| AD- | AUACCAAGGG | 371 | NM_ | ACAUCUCCAC | 781 | NM_ | 394-412 |
| 960849 | UGGAGAUGU | | 001028.3_394- | CCUUGGUAU | | 001028.3_394- | |
| | | | 412_C19U_s | | | 412_G1A_as | |
| AD- | UACCAAGGGU | 372 | NM_ | AGCAUCUCCA | 782 | NM_ | 395-413 |
| 960850 | GGAGAUGCU | | 001028.3_395- | CCCUUGGUA | | 001028.3_395- | |
| | | | 413_s | | | 413_as | |
| AD- | ACCAAGGGUG | 373 | NM_ | AAGCAUCUCC | 783 | NM_ | 396-414 |
| 960851 | GAGAUGCUU | | 001028.3_396- | ACCCUUGGU | | 001028.3_396- | |
| | | | 414_C19U_s | | | 414_G1A_as | |
| AD- | CCAAGGGUGG | 374 | NM_ | AGAGCAUCUC | 784 | NM_ | 397-415 |
| 960852 | AGAUGCUCU | | 001028.3_397- | CACCCUUGG | | 001028.3_397- | |
| | | | 415_C19U_s | | | 415_G1A_as | |
| AD- | CAAGGGUGGA | 375 | NM_ | AGGAGCAUCU | 785 | NM_ | 398-416 |
| 960853 | GAUGCUCCU | | 001028.3_398- | CCACCCUUG | | 001028.3_398- | |
| | | | 416_A19U_s | | | 416_U1A_as | |
| AD- | AAGGGUGGAG | 376 | NM_ | AUGGAGCAUC | 786 | NM_ | 399-417 |
| 960854 | AUGCUCCAU | | 001028.3_399- | UCCACCCUU | | 001028.3_399- | |
| | | | 417_G19U_s | | | 417_C1A_as | |
| AD- | AGGGUGGAGA | 377 | NM_ | ACUGGAGCAU | 787 | NM_ | 400-418 |
| 960855 | UGCUCCAGU | | 001028.3_400- | CUCCACCCU | | 001028.3_400- | |
| | | | 418_C19U_s | | | 418_G1A_as | |
| AD- | GGGUGGAGAU | 378 | NM_ | AGCUGGAGCA | 788 | NM_ | 401-419 |
| 960856 | GCUCCAGCU | | 001028.3_401- | UCUCCACCC | | 001028.3_401- | |
| | | | 419_s | | | 419_as | |
| AD- | GGUGGAGAUG | 379 | NM_ | AAGCUGGAGC | 789 | NM_ | 402-420 |
| 960857 | CUCCAGCUU | | 001028.3_402- | AUCUCCACC | | 001028.3_402- | |
| | | | 420_G19U_s | | | 420_C1A_as | |
| AD- | GUGGAGAUGC | 380 | NM_ | ACAGCUGGAG | 790 | NM_ | 403-421 |
| 960858 | UCCAGCUGU | | 001028.3_403- | CAUCUCCAC | | 001028.3_403- | |
| | | | 421_C19U_s | | | 421_G1A_as | |
| AD- | UGGAGAUGCU | 381 | NM_ | AGCAGCUGGA | 791 | NM_ | 404-422 |
| 960859 | CCAGCUGCU | | 001028.3_404- | GCAUCUCCA | | 001028.3_404- | |
| | | | 422_s | | | 422_as | |
| AD- | GGAGAUGCUC | 382 | NM_ | AAGCAGCUGG | 792 | NM_ | 405-423 |
| 960860 | CAGCUGCUU | | 001028.3_405- | AGCAUCUCC | | 001028.3_405- | |
| | | | 423_G19U_s | | | 423_C1A_as | |
| AD- | GAGAUGCUCC | 383 | NM_ | ACAGCAGCUG | 793 | NM_ | 406-424 |
| 960861 | AGCUGCUGU | | 001028.3_406- | GAGCAUCUC | | 001028.3_406- | |
| | | | 424_G19U_s | | | 424_C1A_as | |
| AD- | AGAUGCUCCA | 384 | NM_ | ACCAGCAGCU | 794 | NM_ | 407-425 |
| 960862 | GCUGCUGGU | | 001028.3_407- | GGAGCAUCU | | 001028.3_407- | |
| | | | 425_s | | | 425_as | |
| AD- | GAUGCUCCAG | 385 | NM_ | AACCAGCAGC | 795 | NM_ | 408-426 |
| 960863 | CUGCUGGUU | | 001028.3_408- | UGGAGCAUC | | 001028.3_408- | |
| | | | 426_G19U_s | | | 426_C1A_as | |
| AD- | AUGCUCCAGC | 386 | NM_ | ACACCAGCAG | 796 | NM_ | 409-427 |
| 960864 | UGCUGGUGU | | 001028.3_409- | CUGGAGCAU | | 001028.3_409- | |
| | | | 427_A19U_s | | | 427_U1A_as | |
| AD- | UGCUCCAGCU | 387 | NM_ | AUCACCAGCA | 797 | NM_ | 410-428 |
| 960865 | GCUGGUGAU | | 001028.3_410- | GCUGGAGCA | | 001028.3_410- | |
| | | | 428_A19U_s | | | 428_U1A_as | |
| AD- | GCUCCAGCUG | 388 | NM_ | AUUCACCAGC | 798 | NM_ | 411-429 |
| 960866 | CUGGUGAAU | | 001028.3_411- | AGCUGGAGC | | 001028.3_411- | |
| | | | 429_G19U_s | | | 429_C1A_as | |
| AD- | CUCCAGCUGC | 389 | NM_ | ACUUCACCAG | 799 | NM_ | 412-430 |
| 960867 | UGGUGAAGU | | 001028.3_412- | CAGCUGGAG | | 001028.3_412- | |
| | | | 430_A19U_s | | | 430_U1A_as | |
| AD- | UCCAGCUGCU | 390 | NM_ | AUCUUCACCA | 800 | NM_ | 413-431 |
| 960868 | GGUGAAGAU | | 001028.3_413- | GCAGCUGGA | | 001028.3_413- | |
| | | | 431_s | | | 431_as | |
| AD- | CCAGCUGCUG | 391 | NM_ | AAUCUUCACC | 801 | NM_ | 414-432 |
| 960869 | GUGAAGAUU | | 001028.3_414- | AGCAGCUGG | | 001028.3_414- | |
| | | | 432_G19U_s | | | 432_C1A_as | |
| AD- | CAGCUGCUGG | 392 | NM_ | ACAUCUUCAC | 802 | NM_ | 415-433 |
| 960870 | UGAAGAUGU | | 001028.3_415- | CAGCAGCUG | | 001028.3_415- | |
| | | | 433_C19U_s | | | 433_G1A_as | |
| AD- | AGCUGCUGGU | 393 | NM_ | AGCAUCUUCA | 803 | NM_ | 416-434 |
| 960871 | GAAGAUGCU | | 001028.3_416- | CCAGCAGCU | | 001028.3_416- | |
| | | | 434_A19U_s | | | 434_U1A_as | |
| AD- | GCUGCUGGUG | 394 | NM_ | AUGCAUCUUC | 804 | NM_ | 417-435 |
| 960872 | AAGAUGCAU | | 001028.3_417- | ACCAGCAGC | | 001028.3_417- | |
| | | | 435_s | | | 435_as | |
| AD- | CUGCUGGUGA | 395 | NM_ | AAUGCAUCUU | 805 | NM_ | 418-436 |
| 960873 | AGAUGCAUU | | 001028.3_418- | CACCAGCAG | | 001028.3_418- | |
| | | | 436_G19U_s | | | 436_C1A_as | |
| AD- | UGCUGGUGAA | 396 | NM_ | ACAUGCAUCU | 806 | NM_ | 419-437 |
| 960874 | GAUGCAUGU | | 001028.3_419- | UCACCAGCA | | 001028.3_419- | |
| | | | 437_A19U_s | | | 437_U1A_as | |
| AD- | GCUGGUGAAG | 397 | NM_ | AUCAUGCAUC | 807 | NM_ | 420-438 |
| 960875 | AUGCAUGAU | | 001028.3_420- | UUCACCAGC | | 001028.3_420- | |
| | | | 438_A19U_s | | | 438_U1A_as | |
| AD- | CUGGUGAAGA | 398 | NM_ | AUUCAUGCAU | 808 | NM_ | 421-439 |
| 960876 | UGCAUGAAU | | 001028.3_421- | CUUCACCAG | | 001028.3_421- | |
| | | | 439_s | | | 439_as | |
| AD- | UGGUGAAGAU | 399 | NM_ | AAUUCAUGCA | 809 | NM_ | 422-440 |
| 960877 | GCAUGAAUU | | 001028.3_422- | UCUUCACCA | | 001028.3_422- | |
| | | | 440_A19U_s | | | 440_U1A_as | |
| AD- | GGUGAAGAUG | 400 | NM_ | AUAUUCAUGC | 810 | NM_ | 423-441 |
| 960878 | CAUGAAUAU | | 001028.3_423- | AUCUUCACC | | 001028.3_423- | |
| | | | 441_G19U_s | | | 441_C1A_as | |
| AD- | GUGAAGAUGC | 401 | NM_ | ACUAUUCAUG | 811 | NM_ | 424-442 |
| 960879 | AUGAAUAGU | | 001028.3_424- | CAUCUUCAC | | 001028.3_424- | |
| | | | 442_G19U_s | | | 442_C1A_as | |
| AD- | UGAAGAUGCA | 402 | NM_ | ACCUAUUCAU | 812 | NM_ | 425-443 |
| 960880 | UGAAUAGGU | | 001028.3_425- | GCAUCUUCA | | 001028.3_425- | |
| | | | 443_s | | | 443_as | |
| AD- | GAAGAUGCAU | 403 | NM_ | AACCUAUUCA | 813 | NM_ | 426-444 |
| 960881 | GAAUAGGUU | | 001028.3_426- | UGCAUCUUC | | 001028.3_426- | |
| | | | 444_C19U_s | | | 444_G1A_as | |
| AD- | AAGAUGCAUG | 404 | NM_ | AGACCUAUUC | 814 | NM_ | 427-445 |
| 960882 | AAUAGGUCU | | 001028.3_427- | AUGCAUCUU | | 001028.3_427- | |
| | | | 445_C19U_s | | | 445_G1A_as | |
| AD- | AGAUGCAUGA | 405 | NM_ | AGGACCUAUU | 815 | NM_ | 428-446 |
| 960883 | AUAGGUCCU | | 001028.3_428- | CAUGCAUCU | | 001028.3_428- | |
| | | | 446_A19U_s | | | 446_U1A_as | |
| AD- | GAUGCAUGAA | 406 | NM_ | AUGGACCUAU | 816 | NM_ | 429-447 |
| 960884 | UAGGUCCAU | | 001028.3_429- | UCAUGCAUC | | 001028.3_429- | |
| | | | 447_A19U_s | | | 447_U1A_as | |
| AD- | AUGCAUGAAU | 407 | NM_ | AUUGGACCUA | 817 | NM_ | 430-448 |
| 960885 | AGGUCCAAU | | 001028.3_430- | UUCAUGCAU | | 001028.3_430- | |
| | | | 448_C19U_s | | | 448_G1A_as | |
| AD- | UGCAUGAAUA | 408 | NM_ | AGUUGGACCU | 818 | NM_ | 431-449 |
| 960886 | GGUCCAACU | | 001028.3_431- | AUUCAUGCA | | 001028.3_431- | |
| | | | 449_C19U_s | | | 449_G1A_as | |
| AD- | GCAUGAAUAG | 409 | NM_ | AGGUUGGACC | 819 | NM_ | 432-450 |
| 960887 | GUCCAACCU | | 001028.3_432- | UAUUCAUGC | | 001028.3_432- | |
| | | | 450_A19U_s | | | 450_U1A_as | |
| AD- | CAUGAAUAGG | 410 | NM_ | AUGGUUGGAC | 820 | NM_ | 433-451 |
| 960888 | UCCAACCAU | | 001028.3_433- | CUAUUCAUG | | 001028.3_433- | |
| | | | 451_G19U_s | | | 451_C1A_as | |
| AD- | AUGAAUAGGU | 411 | NM_ | ACUGGUUGGA | 821 | NM_ | 434-452 |
| 960889 | CCAACCAGU | | 001028.3_434- | CCUAUUCAU | | 001028.3_434- | |
| | | | 452_C19U_s | | | 452_G1A_as | |
| AD- | UGAAUAGGUC | 412 | NM_ | AGCUGGUUGG | 822 | NM_ | 435-453 |
| 960890 | CAACCAGCU | | 001028.3_435- | ACCUAUUCA | | 001028.3_435- | |
| | | | 453_s | | | 453_as | |
| AD- | GAAUAGGUCC | 413 | NM_ | AAGCUGGUUG | 823 | NM_ | 436-454 |
| 960891 | AACCAGCUU | | 001028.3_436- | GACCUAUUC | | 001028.3_436- | |
| | | | 454_G19U_s | | | 454_C1A_as | |
| AD- | AAUAGGUCCA | 414 | NM_ | ACAGCUGGUU | 824 | NM_ | 437-455 |
| 960892 | ACCAGCUGU | | 001028.3_437- | GGACCUAUU | | 001028.3_437- | |
| | | | 455_s | | | 455_as | |
| AD- | AUAGGUCCAA | 415 | NM_ | AACAGCUGGU | 825 | NM_ | 438-456 |
| 960893 | CCAGCUGUU | | 001028.3_438- | UGGACCUAU | | 001028.3_438- | |
| | | | 456_A19U_s | | | 456_U1A_as | |
| AD- | UAGGUCCAAC | 416 | NM_ | AUACAGCUGG | 826 | NM_ | 439-457 |
| 960894 | CAGCUGUAU | | 001028.3_439- | UUGGACCUA | | 001028.3_439- | |
| | | | 457_C19U_s | | | 457_G1A_as | |
| AD- | AGGUCCAACC | 417 | NM_ | AGUACAGCUG | 827 | NM_ | 440-458 |
| 960895 | AGCUGUACU | | 001028.3_440- | GUUGGACCU | | 001028.3_440- | |
| | | | 458_A19U_s | | | 458_U1A_as | |
| AD- | GGUCCAACCA | 418 | NM_ | AUGUACAGCU | 828 | NM_ | 441-459 |
| 960896 | GCUGUACAU | | 001028.3_441- | GGUUGGACC | | 001028.3_441- | |
| | | | 459_s | | | 459_as | |
| AD- | GUCCAACCAG | 419 | NM_ | AAUGUACAGC | 829 | NM_ | 442-460 |
| 960897 | CUGUACAUU | | 001028.3_442- | UGGUUGGAC | | 001028.3_442- | |
| | | | 460_s | | | 460_as | |
| AD- | UCCAACCAGC | 420 | NM_ | AAAUGUACAG | 830 | NM_ | 443-461 |
| 960898 | UGUACAUUU | | 001028.3_443- | CUGGUUGGA | | 001028.3_443- | |
| | | | 461_s | | | 461_as | |
| AD- | CCAACCAGCU | 421 | NM_ | AAAAUGUACA | 831 | NM_ | 444-462 |
| 960899 | GUACAUUUU | | 001028.3_444- | GCUGGUUGG | | 001028.3_444- | |
| | | | 462_G19U_s | | | 462_C1A_as | |
| AD- | CAACCAGCUG | 422 | NM_ | ACAAAUGUAC | 832 | NM_ | 445-463 |
| 960900 | UACAUUUGU | | 001028.3_445- | AGCUGGUUG | | 001028.3_445- | |
| | | | 463_G19U_s | | | 463_C1A_as | |
| AD- | AACCAGCUGU | 423 | NM_ | ACCAAAUGUA | 833 | NM_ | 446-464 |
| 960901 | ACAUUUGGU | | 001028.3_446- | CAGCUGGUU | | 001028.3_446- | |
| | | | 464_A19U_s | | | 464_U1A_as | |
| AD- | ACCAGCUGUA | 424 | NM_ | AUCCAAAUGU | 834 | NM_ | 447-465 |
| 960902 | CAUUUGGAU | | 001028.3_447- | ACAGCUGGU | | 001028.3_447- | |
| | | | 465_A19U_s | | | 465_U1A_as | |
| AD- | CCAGCUGUAC | 425 | NM_ | AUUCCAAAUG | 835 | NM_ | 448-466 |
| 960903 | AUUUGGAAU | | 001028.3_448- | UACAGCUGG | | 001028.3_448- | |
| | | | 466_A19U_s | | | 466_U1A_as | |
| AD- | CAGCUGUACA | 426 | NM_ | AUUUCCAAAU | 836 | NM_ | 449-467 |
| 960904 | UUUGGAAAU | | 001028.3_449- | GUACAGCUG | | 001028.3_449- | |
| | | | 467_A19U_s | | | 467_U1A_as | |
| AD- | AGCUGUACAU | 427 | NM_ | AUUUUCCAAA | 837 | NM_ | 450-468 |
| 960905 | UUGGAAAAU | | 001028.3_450- | UGUACAGCU | | 001028.3_450- | |
| | | | 468_A19U_s | | | 468_U1A_as | |
| AD- | GCUGUACAUU | 428 | NM_ | AUUUUUCCAA | 838 | NM_ | 451-469 |
| 960906 | UGGAAAAAU | | 001028.3_451- | AUGUACAGC | | 001028.3_451- | |
| | | | 469_s | | | 469_as | |
| AD- | CUGUACAUUU | 429 | NM_ | AAUUUUUCCA | 839 | NM_ | 452-470 |
| 960907 | GGAAAAAUU | | 001028.3_452- | AAUGUACAG | | 001028.3_452- | |
| | | | 470_A19U_s | | | 470_U1A_as | |
| AD- | UGUACAUUUG | 430 | NM_ | AUAUUUUUCC | 840 | NM_ | 453-471 |
| 960908 | GAAAAAUAU | | 001028.3_453- | AAAUGUACA | | 001028.3_453- | |
| | | | 471_A19U_s | | | 471_U1A_as | |
| AD- | GUACAUUUGG | 431 | NM_ | AUUAUUUUUC | 841 | NM_ | 454-472 |
| 960909 | AAAAAUAAU | | 001028.3_454- | CAAAUGUAC | | 001028.3_454- | |
| | | | 472_A19U_s | | | 472_U1A_as | |
| AD- | CAUUUGGAAA | 432 | NM_ | AGUUUUAUUU | 842 | NM_ | 457-475 |
| 960910 | AAUAAAACU | | 001028.3_457- | UUCCAAAUG | | 001028.3_457- | |
| | | | 475_s | | | 475_as | |

TABLE 3
RPS25 Modified duplex Sequences

| | Sense Oligo | SEQ | Antisense | SEQ | NM_001028.3 |
|---|---|---|---|---|---|
| Duplex | Sequence | ID | OligoSequence | ID | Target |
| ID | 5′ to 3′ | NO: | 5′ to 3′ | NO: | Site |
| AD- | CUUUUUGUCCGAC | 843 | AAAGAUGUCGGAC | 1253 | 1-19 |
| 960501 | AUCUUUdTdT | | AAAAAGdTdT | | |
| AD- | UUUUUGUCCGACA | 844 | ACAAGAUGUCGGA | 1254 | 2-20 |
| 960502 | UCUUGUdTdT | | CAAAAAdTdT | | |
| AD- | UUUUGUCCGACAU | 845 | AUCAAGAUGUCGG | 1255 | 3-21 |
| 960503 | CUUGAUdTdT | | ACAAAAdTdT | | |
| AD- | UUUGUCCGACAUC | 846 | AGUCAAGAUGUCG | 1256 | 4-22 |
| 960504 | UUGACUdTdT | | GACAAAdTdT | | |
| AD- | UUGUCCGACAUCU | 847 | ACGUCAAGAUGUC | 1257 | 5-23 |
| 960505 | UGACGUdTdT | | GGACAAdTdT | | |
| AD- | UGUCCGACAUCUU | 848 | AUCGUCAAGAUGU | 1258 | 6-24 |
| 960506 | GACGAUdTdT | | CGGACAdTdT | | |
| AD- | GUCCGACAUCUUG | 849 | ACUCGUCAAGAUG | 1259 | 7-25 |
| 960507 | ACGAGUdTdT | | UCGGACdTdT | | |
| AD- | UCCGACAUCUUGA | 850 | ACCUCGUCAAGAU | 1260 | 8-26 |
| 960508 | CGAGGUdTdT | | GUCGGAdTdT | | |
| AD- | CCGACAUCUUGAC | 851 | AGCCUCGUCAAGA | 1261 | 9-27 |
| 960509 | GAGGCUdTdT | | UGUCGGdTdT | | |
| AD- | CGACAUCUUGACG | 852 | AAGCCUCGUCAAG | 1262 | 10-28 |
| 960510 | AGGCUUdTdT | | AUGUCGdTdT | | |
| AD- | GACAUCUUGACGA | 853 | ACAGCCUCGUCAA | 1263 | 11-29 |
| 960511 | GGCUGUdTdT | | GAUGUCdTdT | | |
| AD- | ACAUCUUGACGAG | 854 | AGCAGCCUCGUCA | 1264 | 12-30 |
| 960512 | GCUGCUdTdT | | AGAUGUdTdT | | |
| AD- | CAUCUUGACGAGG | 855 | ACGCAGCCUCGUC | 1265 | 13-31 |
| 960513 | CUGCGUdTdT | | AAGAUGdTdT | | |
| AD- | AUCUUGACGAGGC | 856 | ACCGCAGCCUCGU | 1266 | 14-32 |
| 960514 | UGCGGUdTdT | | CAAGAUdTdT | | |
| AD- | UCUUGACGAGGCU | 857 | AACCGCAGCCUCG | 1267 | 15-33 |
| 960515 | GCGGUUdTdT | | UCAAGAdTdT | | |
| AD- | CUUGACGAGGCUG | 858 | ACACCGCAGCCUC | 1268 | 16-34 |
| 960516 | CGGUGUdTdT | | GUCAAGdTdT | | |
| AD- | UUGACGAGGCUGC | 859 | AACACCGCAGCCU | 1269 | 17-35 |
| 960517 | GGUGUUdTdT | | CGUCAAdTdT | | |
| AD- | UGACGAGGCUGCG | 860 | AGACACCGCAGCC | 1270 | 18-36 |
| 960518 | GUGUCUdTdT | | UCGUCAdTdT | | |
| AD- | GACGAGGCUGCGG | 861 | AAGACACCGCAGC | 1271 | 19-37 |
| 960519 | UGUCUUdTdT | | CUCGUCdTdT | | |
| AD- | ACGAGGCUGCGGU | 862 | ACAGACACCGCAG | 1272 | 20-38 |
| 960520 | GUCUGUdTdT | | CCUCGUdTdT | | |
| AD- | CGAGGCUGCGGUG | 863 | AGCAGACACCGCA | 1273 | 21-39 |
| 960521 | UCUGCUdTdT | | GCCUCGdTdT | | |
| AD- | GAGGCUGCGGUGU | 864 | AAGCAGACACCGC | 1274 | 22-40 |
| 960522 | CUGCUUdTdT | | AGCCUCdTdT | | |
| AD- | AGGCUGCGGUGUC | 865 | ACAGCAGACACCG | 1275 | 23-41 |
| 960523 | UGCUGUdTdT | | CAGCCUdTdT | | |
| AD- | GGCUGCGGUGUCU | 866 | AGCAGCAGACACC | 1276 | 24-42 |
| 960524 | GCUGCUdTdT | | GCAGCCdTdT | | |
| AD- | GCUGCGGUGUCUG | 867 | AAGCAGCAGACAC | 1277 | 25-43 |
| 960525 | CUGCUUdTdT | | CGCAGCdTdT | | |
| AD- | CUGCGGUGUCUGC | 868 | AUAGCAGCAGACA | 1278 | 26-44 |
| 960526 | UGCUAUdTdT | | CCGCAGdTdT | | |
| AD- | UGCGGUGUCUGCU | 869 | AAUAGCAGCAGAC | 1279 | 27-45 |
| 960527 | GCUAUUdTdT | | ACCGCAdTdT | | |
| AD- | GCGGUGUCUGCUG | 870 | AAAUAGCAGCAGA | 1280 | 28-46 |
| 960528 | CUAUUUdTdT | | CACCGCdTdT | | |
| AD- | CGGUGUCUGCUGC | 871 | AGAAUAGCAGCAG | 1281 | 29-47 |
| 960529 | UAUUCUdTdT | | ACACCGdTdT | | |
| AD- | GGUGUCUGCUGCU | 872 | AAGAAUAGCAGCA | 1282 | 30-48 |
| 960530 | AUUCUUdTdT | | GACACCdTdT | | |
| AD- | GUGUCUGCUGCUA | 873 | AGAGAAUAGCAGC | 1283 | 31-49 |
| 960531 | UUCUCUdTdT | | AGACACdTdT | | |
| AD- | UGUCUGCUGCUAU | 874 | AGGAGAAUAGCAG | 1284 | 32-50 |
| 960532 | UCUCCUdTdT | | CAGACAdTdT | | |
| AD- | GUCUGCUGCUAUU | 875 | ACGGAGAAUAGCA | 1285 | 33-51 |
| 960533 | CUCCGUdTdT | | GCAGACdTdT | | |
| AD- | UCUGCUGCUAUUC | 876 | AUCGGAGAAUAGC | 1286 | 34-52 |
| 960534 | UCCGAUdTdT | | AGCAGAdTdT | | |
| AD- | CUGCUGCUAUUCU | 877 | ACUCGGAGAAUAG | 1287 | 35-53 |
| 960535 | CCGAGUdTdT | | CAGCAGdTdT | | |
| AD- | UGCUGCUAUUCUC | 878 | AGCUCGGAGAAUA | 1288 | 36-54 |
| 960536 | CGAGCUdTdT | | GCAGCAdTdT | | |
| AD- | GCUGCUAUUCUCC | 879 | AAGCUCGGAGAAU | 1289 | 37-55 |
| 960537 | GAGCUUdTdT | | AGCAGCdTdT | | |
| AD- | CUGCUAUUCUCCG | 880 | AAAGCUCGGAGAA | 1290 | 38-56 |
| 960538 | AGCUUUdTdT | | UAGCAGdTdT | | |
| AD- | UGCUAUUCUCCGA | 881 | AGAAGCUCGGAGA | 1291 | 39-57 |
| 960539 | GCUUCUdTdT | | AUAGCAdTdT | | |
| AD- | GCUAUUCUCCGAG | 882 | ACGAAGCUCGGAG | 1292 | 40-58 |
| 960540 | CUUCGUdTdT | | AAUAGCdTdT | | |
| AD- | CUAUUCUCCGAGC | 883 | AGCGAAGCUCGGA | 1293 | 41-59 |
| 960541 | UUCGCUdTdT | | GAAUAGdTdT | | |
| AD- | UAUUCUCCGAGCU | 884 | AUGCGAAGCUCGG | 1294 | 42-60 |
| 960542 | UCGCAUdTdT | | AGAAUAdTdT | | |
| AD- | AUUCUCCGAGCUU | 885 | AUUGCGAAGCUCG | 1295 | 43-61 |
| 960543 | CGCAAUdTdT | | GAGAAUdTdT | | |
| AD- | UUCUCCGAGCUUC | 886 | AAUUGCGAAGCUC | 1296 | 44-62 |
| 960544 | GCAAUUdTdT | | GGAGAAdTdT | | |
| AD- | UCUCCGAGCUUCG | 887 | ACAUUGCGAAGCU | 1297 | 45-63 |
| 960545 | CAAUGUdTdT | | CGGAGAdTdT | | |
| AD- | CUCCGAGCUUCGC | 888 | AGCAUUGCGAAGC | 1298 | 46-64 |
| 960546 | AAUGCUdTdT | | UCGGAGdTdT | | |
| AD- | UCCGAGCUUCGCA | 889 | AGGCAUUGCGAAG | 1299 | 47-65 |
| 960547 | AUGCCUdTdT | | CUCGGAdTdT | | |
| AD- | CCGAGCUUCGCAA | 890 | ACGGCAUUGCGAA | 1300 | 48-66 |
| 960548 | UGCCGUdTdT | | GCUCGGdTdT | | |
| AD- | CGAGCUUCGCAAU | 891 | AGCGGCAUUGCGA | 1301 | 49-67 |
| 960549 | GCCGCUdTdT | | AGCUCGdTdT | | |
| AD- | GAGCUUCGCAAUG | 892 | AGGCGGCAUUGCG | 1302 | 50-68 |
| 960550 | CCGCCUdTdT | | AAGCUCdTdT | | |
| AD- | AGCUUCGCAAUGC | 893 | AAGGCGGCAUUGC | 1303 | 51-69 |
| 960551 | CGCCUUdTdT | | GAAGCUdTdT | | |
| AD- | GCUUCGCAAUGCC | 894 | AUAGGCGGCAUUG | 1304 | 52-70 |
| 960552 | GCCUAUdTdT | | CGAAGCdTdT | | |
| AD- | CUUCGCAAUGCCG | 895 | AUUAGGCGGCAUU | 1305 | 53-71 |
| 960553 | CCUAAUdTdT | | GCGAAGdTdT | | |
| AD- | UUCGCAAUGCCGC | 896 | ACUUAGGCGGCAU | 1306 | 54-72 |
| 960554 | CUAAGUdTdT | | UGCGAAdTdT | | |
| AD- | UCGCAAUGCCGCC | 897 | ACCUUAGGCGGCA | 1307 | 55-73 |
| 960555 | UAAGGUdTdT | | UUGCGAdTdT | | |
| AD- | CGCAAUGCCGCCU | 898 | AUCCUUAGGCGGC | 1308 | 56-74 |
| 960556 | AAGGAUdTdT | | AUUGCGdTdT | | |
| AD- | GCAAUGCCGCCUA | 899 | AGUCCUUAGGCGG | 1309 | 57-75 |
| 960557 | AGGACUdTdT | | CAUUGCdTdT | | |
| AD- | CAAUGCCGCCUAA | 900 | ACGUCCUUAGGCG | 1310 | 58-76 |
| 960558 | GGACGUdTdT | | GCAUUGdTdT | | |
| AD- | AAUGCCGCCUAAG | 901 | AUCGUCCUUAGGC | 1311 | 59-77 |
| 960559 | GACGAUdTdT | | GGCAUUdTdT | | |
| AD- | AUGCCGCCUAAGG | 902 | AGUCGUCCUUAGG | 1312 | 60-78 |
| 960560 | ACGACUdTdT | | CGGCAUdTdT | | |
| AD- | UGCCGCCUAAGGA | 903 | AUGUCGUCCUUAG | 1313 | 61-79 |
| 960561 | CGACAUdTdT | | GCGGCAdTdT | | |
| AD- | GCCGCCUAAGGAC | 904 | AUUGUCGUCCUUA | 1314 | 62-80 |
| 960562 | GACAAUdTdT | | GGCGGCdTdT | | |
| AD- | CCGCCUAAGGACG | 905 | ACUUGUCGUCCUU | 1315 | 63-81 |
| 960563 | ACAAGUdTdT | | AGGCGGdTdT | | |
| AD- | CGCCUAAGGACGA | 906 | AUCUUGUCGUCCU | 1316 | 64-82 |
| 960564 | CAAGAUdTdT | | UAGGCGdTdT | | |
| AD- | GCCUAAGGACGAC | 907 | AUUCUUGUCGUCC | 1317 | 65-83 |
| 960565 | AAGAAUdTdT | | UUAGGCdTdT | | |
| AD- | CCUAAGGACGACA | 908 | ACUUCUUGUCGUC | 1318 | 66-84 |
| 960566 | AGAAGUdTdT | | CUUAGGdTdT | | |
| AD- | CUAAGGACGACAA | 909 | AUCUUCUUGUCGU | 1319 | 67-85 |
| 960567 | GAAGAUdTdT | | CCUUAGdTdT | | |
| AD- | UAAGGACGACAAG | 910 | AUUCUUCUUGUCG | 1320 | 68-86 |
| 960568 | AAGAAUdTdT | | UCCUUAdTdT | | |
| AD- | AAGGACGACAAGA | 911 | ACUUCUUCUUGUC | 1321 | 69-87 |
| 960569 | AGAAGUdTdT | | GUCCUUdTdT | | |
| AD- | AGGACGACAAGAA | 912 | AUCUUCUUCUUGU | 1322 | 70-88 |
| 960570 | GAAGAUdTdT | | CGUCCUdTdT | | |
| AD- | GGACGACAAGAAG | 913 | AUUCUUCUUCUUG | 1323 | 71-89 |
| 960571 | AAGAAUdTdT | | UCGUCCdTdT | | |
| AD- | GACGACAAGAAGA | 914 | ACUUCUUCUUCUU | 1324 | 72-90 |
| 960572 | AGAAGUdTdT | | GUCGUCdTdT | | |
| AD- | ACGACAAGAAGAA | 915 | ACCUUCUUCUUCU | 1325 | 73-91 |
| 960573 | GAAGGUdTdT | | UGUCGUdTdT | | |
| AD- | CGACAAGAAGAAG | 916 | AUCCUUCUUCUUC | 1326 | 74-92 |
| 960574 | AAGGAUdTdT | | UUGUCGdTdT | | |
| AD- | GACAAGAAGAAGA | 917 | AGUCCUUCUUCUU | 1327 | 75-93 |
| 960575 | AGGACUdTdT | | CUUGUCdTdT | | |
| AD- | ACAAGAAGAAGAA | 918 | ACGUCCUUCUUCU | 1328 | 76-94 |
| 960576 | GGACGUdTdT | | UCUUGUdTdT | | |
| AD- | CAAGAAGAAGAAG | 919 | AGCGUCCUUCUUC | 1329 | 77-95 |
| 960577 | GACGCUdTdT | | UUCUUGdTdT | | |
| AD- | AAGAAGAAGAAGG | 920 | AAGCGUCCUUCUU | 1330 | 78-96 |
| 960578 | ACGCUUdTdT | | CUUCUUdTdT | | |
| AD- | AGAAGAAGAAGGA | 921 | ACAGCGUCCUUCU | 1331 | 79-97 |
| 960579 | CGCUGUdTdT | | UCUUCUdTdT | | |
| AD- | GAAGAAGAAGGAC | 922 | ACCAGCGUCCUUC | 1332 | 80-98 |
| 960580 | GCUGGUdTdT | | UUCUUCdTdT | | |
| AD- | AAGAAGAAGGACG | 923 | AUCCAGCGUCCUU | 1333 | 81-99 |
| 960581 | CUGGAUdTdT | | CUUCUUdTdT | | |
| AD- | AGAAGAAGGACGC | 924 | AUUCCAGCGUCCU | 1334 | 82-100 |
| 960582 | UGGAAUdTdT | | UCUUCUdTdT | | |
| AD- | GAAGAAGGACGCU | 925 | AUUUCCAGCGUCC | 1335 | 83-101 |
| 960583 | GGAAAUdTdT | | UUCUUCdTdT | | |
| AD- | AAGAAGGACGCUG | 926 | ACUUUCCAGCGUC | 1336 | 84-102 |
| 960584 | GAAAGUdTdT | | CUUCUUdTdT | | |
| AD- | AGAAGGACGCUGG | 927 | AACUUUCCAGCGU | 1337 | 85-103 |
| 960585 | AAAGUUdTdT | | CCUUCUdTdT | | |
| AD- | GAAGGACGCUGGA | 928 | AGACUUUCCAGCG | 1338 | 86-104 |
| 960586 | AAGUCUdTdT | | UCCUUCdTdT | | |
| AD- | AAGGACGCUGGAA | 929 | ACGACUUUCCAGC | 1339 | 87-105 |
| 960587 | AGUCGUdTdT | | GUCCUUdTdT | | |
| AD- | AGGACGCUGGAAA | 930 | ACCGACUUUCCAG | 1340 | 88-106 |
| 960588 | GUCGGUdTdT | | CGUCCUdTdT | | |
| AD- | GGACGCUGGAAAG | 931 | AGCCGACUUUCCA | 1341 | 89-107 |
| 960589 | UCGGCUdTdT | | GCGUCCdTdT | | |
| AD- | GACGCUGGAAAGU | 932 | AGGCCGACUUUCC | 1342 | 90-108 |
| 960590 | CGGCCUdTdT | | AGCGUCdTdT | | |
| AD- | ACGCUGGAAAGUC | 933 | AUGGCCGACUUUC | 1343 | 91-109 |
| 960591 | GGCCAUdTdT | | CAGCGUdTdT | | |
| AD- | CGCUGGAAAGUCG | 934 | AUUGGCCGACUUU | 1344 | 92-110 |
| 960592 | GCCAAUdTdT | | CCAGCGdTdT | | |
| AD- | GCUGGAAAGUCGG | 935 | ACUUGGCCGACUU | 1345 | 93-111 |
| 960593 | CCAAGUdTdT | | UCCAGCdTdT | | |
| AD- | CUGGAAAGUCGGC | 936 | AUCUUGGCCGACU | 1346 | 94-112 |
| 960594 | CAAGAUdTdT | | UUCCAGdTdT | | |
| AD- | UGGAAAGUCGGCC | 937 | AUUCUUGGCCGAC | 1347 | 95-113 |
| 960595 | AAGAAUdTdT | | UUUCCAdTdT | | |
| AD- | GGAAAGUCGGCCA | 938 | AUUUCUUGGCCGA | 1348 | 96-114 |
| 960596 | AGAAAUdTdT | | CUUUCCdTdT | | |
| AD- | GAAAGUCGGCCAA | 939 | ACUUUCUUGGCCG | 1349 | 97-115 |
| 960597 | GAAAGUdTdT | | ACUUUCdTdT | | |
| AD- | AAAGUCGGCCAAG | 940 | AUCUUUCUUGGCC | 1350 | 98-116 |
| 960598 | AAAGAUdTdT | | GACUUUdTdT | | |
| AD- | AAGUCGGCCAAGA | 941 | AGUCUUUCUUGGC | 1351 | 99-117 |
| 960599 | AAGACUdTdT | | CGACUUdTdT | | |
| AD- | AGUCGGCCAAGAA | 942 | AUGUCUUUCUUGG | 1352 | 100-118 |
| 960600 | AGACAUdTdT | | CCGACUdTdT | | |
| AD- | GUCGGCCAAGAAA | 943 | AUUGUCUUUCUUG | 1353 | 101-119 |
| 960601 | GACAAUdTdT | | GCCGACdTdT | | |
| AD- | UCGGCCAAGAAAG | 944 | AUUUGUCUUUCUU | 1354 | 102-120 |
| 960602 | ACAAAUdTdT | | GGCCGAdTdT | | |
| AD- | CGGCCAAGAAAGA | 945 | ACUUUGUCUUUCU | 1355 | 103-121 |
| 960603 | CAAAGUdTdT | | UGGCCGdTdT | | |
| AD- | GGCCAAGAAAGAC | 946 | AUCUUUGUCUUUC | 1356 | 104-122 |
| 960604 | AAAGAUdTdT | | UUGGCCdTdT | | |
| AD- | GCCAAGAAAGACA | 947 | AGUCUUUGUCUUU | 1357 | 105-123 |
| 960605 | AAGACUdTdT | | CUUGGCdTdT | | |
| AD- | CCAAGAAAGACAA | 948 | AGGUCUUUGUCUU | 1358 | 106-124 |
| 960606 | AGACCUdTdT | | UCUUGGdTdT | | |
| AD- | CAAGAAAGACAAA | 949 | AGGGUCUUUGUCU | 1359 | 107-125 |
| 960607 | GACCCUdTdT | | UUCUUGdTdT | | |
| AD- | AGAAAGACAAAGA | 950 | ACUGGGUCUUUGU | 1360 | 109-127 |
| 960608 | CCCAGUdTdT | | CUUUCUdTdT | | |
| AD- | GAAAGACAAAGAC | 951 | AACUGGGUCUUUG | 1361 | 110-128 |
| 960609 | CCAGUUdTdT | | UCUUUCdTdT | | |
| AD- | AAAGACAAAGACC | 952 | ACACUGGGUCUUU | 1362 | 111-129 |
| 960610 | CAGUGUdTdT | | GUCUUUdTdT | | |
| AD- | AAGACAAAGACCC | 953 | AUCACUGGGUCUU | 1363 | 112-130 |
| 960611 | AGUGAUdTdT | | UGUCUUdTdT | | |
| AD- | AGACAAAGACCCA | 954 | AUUCACUGGGUCU | 1364 | 113-131 |
| 960612 | GUGAAUdTdT | | UUGUCUdTdT | | |
| AD- | GACAAAGACCCAG | 955 | AGUUCACUGGGUC | 1365 | 114-132 |
| 960613 | UGAACUdTdT | | UUUGUCdTdT | | |
| AD- | ACAAAGACCCAGU | 956 | AUGUUCACUGGGU | 1366 | 115-133 |
| 960614 | GAACAUdTdT | | CUUUGUdTdT | | |
| AD- | CAAAGACCCAGUG | 957 | AUUGUUCACUGGG | 1367 | 116-134 |
| 960615 | AACAAUdTdT | | UCUUUGdTdT | | |
| AD- | AAAGACCCAGUGA | 958 | AUUUGUUCACUGG | 1368 | 117-135 |
| 960616 | ACAAAUdTdT | | GUCUUUdTdT | | |
| AD- | AAGACCCAGUGAA | 959 | AAUUUGUUCACUG | 1369 | 118-136 |
| 960617 | CAAAUUdTdT | | GGUCUUdTdT | | |
| AD- | AGACCCAGUGAAC | 960 | AGAUUUGUUCACU | 1370 | 119-137 |
| 960618 | AAAUCUdTdT | | GGGUCUdTdT | | |
| AD- | GACCCAGUGAACA | 961 | AGGAUUUGUUCAC | 1371 | 120-138 |
| 960619 | AAUCCUdTdT | | UGGGUCdTdT | | |
| AD- | ACCCAGUGAACAA | 962 | ACGGAUUUGUUCA | 1372 | 121-139 |
| 960620 | AUCCGUdTdT | | CUGGGUdTdT | | |
| AD- | CCCAGUGAACAAA | 963 | ACCGGAUUUGUUC | 1373 | 122-140 |
| 960621 | UCCGGUdTdT | | ACUGGGdTdT | | |
| AD- | GGGCAAGGCCAAA | 964 | AUUCUUUUUGGCC | 1374 | 140-158 |
| 960622 | AAGAAUdTdT | | UUGCCCdTdT | | |
| AD- | GGCAAGGCCAAAA | 965 | ACUUCUUUUUGGC | 1375 | 141-159 |
| 960623 | AGAAGUdTdT | | CUUGCCdTdT | | |
| AD- | GCAAGGCCAAAAA | 966 | AUCUUCUUUUUGG | 1376 | 142-160 |
| 960624 | GAAGAUdTdT | | CCUUGCdTdT | | |
| AD- | AGGCCAAAAAGAA | 967 | AACUUCUUCUUUU | 1377 | 145-163 |
| 960625 | GAAGUUdTdT | | UGGCCUdTdT | | |
| AD- | GGCCAAAAAGAAG | 968 | ACACUUCUUCUUU | 1378 | 146-164 |
| 960626 | AAGUGUdTdT | | UUGGCCdTdT | | |
| AD- | GCCAAAAAGAAGA | 969 | ACCACUUCUUCUU | 1379 | 147-165 |
| 960627 | AGUGGUdTdT | | UUUGGCdTdT | | |
| AD- | CCAAAAAGAAGAA | 970 | AACCACUUCUUCU | 1380 | 148-166 |
| 960628 | GUGGUUdTdT | | UUUUGGdTdT | | |
| AD- | CAAAAAGAAGAAG | 971 | AGACCACUUCUUC | 1381 | 149-167 |
| 960629 | UGGUCUdTdT | | UUUUUGdTdT | | |
| AD- | AAAAAGAAGAAGU | 972 | AGGACCACUUCUU | 1382 | 150-168 |
| 960630 | GGUCCUdTdT | | CUUUUUdTdT | | |
| AD- | AAAAGAAGAAGUG | 973 | AUGGACCACUUCU | 1383 | 151-169 |
| 960631 | GUCCAUdTdT | | UCUUUUdTdT | | |
| AD- | AAAGAAGAAGUGG | 974 | AUUGGACCACUUC | 1384 | 152-170 |
| 960632 | UCCAAUdTdT | | UUCUUUdTdT | | |
| AD- | AAGAAGAAGUGGU | 975 | AUUUGGACCACUU | 1385 | 153-171 |
| 960633 | CCAAAUdTdT | | CUUCUUdTdT | | |
| AD- | AGAAGAAGUGGUC | 976 | ACUUUGGACCACU | 1386 | 154-172 |
| 960634 | CAAAGUdTdT | | UCUUCUdTdT | | |
| AD- | GAAGAAGUGGUCC | 977 | ACCUUUGGACCAC | 1387 | 155-173 |
| 960635 | AAAGGUdTdT | | UUCUUCdTdT | | |
| AD- | AAGAAGUGGUCCA | 978 | AGCCUUUGGACCA | 1388 | 156-174 |
| 960636 | AAGGCUdTdT | | CUUCUUdTdT | | |
| AD- | AGAAGUGGUCCAA | 979 | AUGCCUUUGGACC | 1389 | 157-175 |
| 960637 | AGGCAUdTdT | | ACUUCUdTdT | | |
| AD- | GAAGUGGUCCAAA | 980 | AUUGCCUUUGGAC | 1390 | 158-176 |
| 960638 | GGCAAUdTdT | | CACUUCdTdT | | |
| AD- | AAGUGGUCCAAAG | 981 | AUUUGCCUUUGGA | 1391 | 159-177 |
| 960639 | GCAAAUdTdT | | CCACUUdTdT | | |
| AD- | AGUGGUCCAAAGG | 982 | ACUUUGCCUUUGG | 1392 | 160-178 |
| 960640 | CAAAGUdTdT | | ACCACUdTdT | | |
| AD- | GUGGUCCAAAGGC | 983 | AACUUUGCCUUUG | 1393 | 161-179 |
| 960641 | AAAGUUdTdT | | GACCACdTdT | | |
| AD- | UGGUCCAAAGGCA | 984 | AAACUUUGCCUUU | 1394 | 162-180 |
| 960642 | AAGUUUdTdT | | GGACCAdTdT | | |
| AD- | GGUCCAAAGGCAA | 985 | AGAACUUUGCCUU | 1395 | 163-181 |
| 960643 | AGUUCUdTdT | | UGGACCdTdT | | |
| AD- | GUCCAAAGGCAAA | 986 | ACGAACUUUGCCU | 1396 | 164-182 |
| 960644 | GUUCGUdTdT | | UUGGACdTdT | | |
| AD- | UCCAAAGGCAAAG | 987 | ACCGAACUUUGCC | 1397 | 165-183 |
| 960645 | UUCGGUdTdT | | UUUGGAdTdT | | |
| AD- | CCAAAGGCAAAGU | 988 | ACCCGAACUUUGC | 1398 | 166-184 |
| 960646 | UCGGGUdTdT | | CUUUGGdTdT | | |
| AD- | CAAAGGCAAAGUU | 989 | AUCCCGAACUUUG | 1399 | 167-185 |
| 960647 | CGGGAUdTdT | | CCUUUGdTdT | | |
| AD- | AAAGGCAAAGUUC | 990 | AGUCCCGAACUUU | 1400 | 168-186 |
| 960648 | GGGACUdTdT | | GCCUUUdTdT | | |
| AD- | AAGGCAAAGUUCG | 991 | AUGUCCCGAACUU | 1401 | 169-187 |
| 960649 | GGACAUdTdT | | UGCCUUdTdT | | |
| AD- | AGGCAAAGUUCGG | 992 | AUUGUCCCGAACU | 1402 | 170-188 |
| 960650 | GACAAUdTdT | | UUGCCUdTdT | | |
| AD- | GGCAAAGUUCGGG | 993 | ACUUGUCCCGAAC | 1403 | 171-189 |
| 960651 | ACAAGUdTdT | | UUUGCCdTdT | | |
| AD- | GCAAAGUUCGGGA | 994 | AGCUUGUCCCGAA | 1404 | 172-190 |
| 960652 | CAAGCUdTdT | | CUUUGCdTdT | | |
| AD- | CAAAGUUCGGGAC | 995 | AAGCUUGUCCCGA | 1405 | 173-191 |
| 960653 | AAGCUUdTdT | | ACUUUGdTdT | | |
| AD- | AAAGUUCGGGACA | 996 | AGAGCUUGUCCCG | 1406 | 174-192 |
| 960654 | AGCUCUdTdT | | AACUUUdTdT | | |
| AD- | AAGUUCGGGACAA | 997 | AUGAGCUUGUCCC | 1407 | 175-193 |
| 960655 | GCUCAUdTdT | | GAACUUdTdT | | |
| AD- | AGUUCGGGACAAG | 998 | AUUGAGCUUGUCC | 1408 | 176-194 |
| 960656 | CUCAAUdTdT | | CGAACUdTdT | | |
| AD- | GUUCGGGACAAGC | 999 | AAUUGAGCUUGUC | 1409 | 177-195 |
| 960657 | UCAAUUdTdT | | CCGAACdTdT | | |
| AD- | UUCGGGACAAGCU | 1000 | AUAUUGAGCUUGU | 1410 | 178-196 |
| 960658 | CAAUAUdTdT | | CCCGAAdTdT | | |
| AD- | UCGGGACAAGCUC | 1001 | AUUAUUGAGCUUG | 1411 | 179-197 |
| 960659 | AAUAAUdTdT | | UCCCGAdTdT | | |
| AD- | CGGGACAAGCUCA | 1002 | AGUUAUUGAGCUU | 1412 | 180-198 |
| 960660 | AUAACUdTdT | | GUCCCGdTdT | | |
| AD- | GGGACAAGCUCAA | 1003 | AAGUUAUUGAGCU | 1413 | 181-199 |
| 960661 | UAACUUdTdT | | UGUCCCdTdT | | |
| AD- | GGACAAGCUCAAU | 1004 | AAAGUUAUUGAGC | 1414 | 182-200 |
| 960662 | AACUUUdTdT | | UUGUCCdTdT | | |
| AD- | GACAAGCUCAAUA | 1005 | AUAAGUUAUUGAG | 1415 | 183-201 |
| 960663 | ACUUAUdTdT | | CUUGUCdTdT | | |
| AD- | ACAAGCUCAAUAA | 1006 | ACUAAGUUAUUGA | 1416 | 184-202 |
| 960664 | CUUAGUdTdT | | GCUUGUdTdT | | |
| AD- | CAAGCUCAAUAAC | 1007 | AACUAAGUUAUUG | 1417 | 185-203 |
| 960665 | UUAGUUdTdT | | AGCUUGdTdT | | |
| AD- | AAGCUCAAUAACU | 1008 | AGACUAAGUUAUU | 1418 | 186-204 |
| 960666 | UAGUCUdTdT | | GAGCUUdTdT | | |
| AD- | AGCUCAAUAACUU | 1009 | AAGACUAAGUUAU | 1419 | 187-205 |
| 960667 | AGUCUUdTdT | | UGAGCUdTdT | | |
| AD- | GCUCAAUAACUUA | 1010 | AAAGACUAAGUUA | 1420 | 188-206 |
| 960668 | GUCUUUdTdT | | UUGAGCdTdT | | |
| AD- | CUCAAUAACUUAG | 1011 | ACAAGACUAAGUU | 1421 | 189-207 |
| 960669 | UCUUGUdTdT | | AUUGAGdTdT | | |
| AD- | UCAAUAACUUAGU | 1012 | AACAAGACUAAGU | 1422 | 190-208 |
| 960670 | CUUGUUdTdT | | UAUUGAdTdT | | |
| AD- | CAAUAACUUAGUC | 1013 | AAACAAGACUAAG | 1423 | 191-209 |
| 960671 | UUGUUUdTdT | | UUAUUGdTdT | | |
| AD- | AAUAACUUAGUCU | 1014 | AAAACAAGACUAA | 1424 | 192-210 |
| 960672 | UGUUUUdTdT | | GUUAUUdTdT | | |
| AD- | AUAACUUAGUCUU | 1015 | ACAAACAAGACUA | 1425 | 193-211 |
| 960673 | GUUUGUdTdT | | AGUUAUdTdT | | |
| AD- | UAACUUAGUCUUG | 1016 | AUCAAACAAGACU | 1426 | 194-212 |
| 960674 | UUUGAUdTdT | | AAGUUAdTdT | | |
| AD- | AACUUAGUCUUGU | 1017 | AGUCAAACAAGAC | 1427 | 195-213 |
| 960675 | UUGACUdTdT | | UAAGUUdTdT | | |
| AD- | ACUUAGUCUUGUU | 1018 | AUGUCAAACAAGA | 1428 | 196-214 |
| 960676 | UGACAUdTdT | | CUAAGUdTdT | | |
| AD- | CUUAGUCUUGUUU | 1019 | AUUGUCAAACAAG | 1429 | 197-215 |
| 960677 | GACAAUdTdT | | ACUAAGdTdT | | |
| AD- | UUAGUCUUGUUUG | 1020 | AUUUGUCAAACAA | 1430 | 198-216 |
| 960678 | ACAAAUdTdT | | GACUAAdTdT | | |
| AD- | UAGUCUUGUUUGA | 1021 | ACUUUGUCAAACA | 1431 | 199-217 |
| 960679 | CAAAGUdTdT | | AGACUAdTdT | | |
| AD- | AGUCUUGUUUGAC | 1022 | AGCUUUGUCAAAC | 1432 | 200-218 |
| 960680 | AAAGCUdTdT | | AAGACUdTdT | | |
| AD- | GUCUUGUUUGACA | 1023 | AAGCUUUGUCAAA | 1433 | 201-219 |
| 960681 | AAGCUUdTdT | | CAAGACdTdT | | |
| AD- | UCUUGUUUGACAA | 1024 | AUAGCUUUGUCAA | 1434 | 202-220 |
| 960682 | AGCUAUdTdT | | ACAAGAdTdT | | |
| AD- | CUUGUUUGACAAA | 1025 | AGUAGCUUUGUCA | 1435 | 203-221 |
| 960683 | GCUACUdTdT | | AACAAGdTdT | | |
| AD- | UUGUUUGACAAAG | 1026 | AGGUAGCUUUGUC | 1436 | 204-222 |
| 960684 | CUACCUdTdT | | AAACAAdTdT | | |
| AD- | UGUUUGACAAAGC | 1027 | AAGGUAGCUUUGU | 1437 | 205-223 |
| 960685 | UACCUUdTdT | | CAAACAdTdT | | |
| AD- | GUUUGACAAAGCU | 1028 | AUAGGUAGCUUUG | 1438 | 206-224 |
| 960686 | ACCUAUdTdT | | UCAAACdTdT | | |
| AD- | UUUGACAAAGCUA | 1029 | AAUAGGUAGCUUU | 1439 | 207-225 |
| 960687 | CCUAUUdTdT | | GUCAAAdTdT | | |
| AD- | UUGACAAAGCUAC | 1030 | ACAUAGGUAGCUU | 1440 | 208-226 |
| 960688 | CUAUGUdTdT | | UGUCAAdTdT | | |
| AD- | UGACAAAGCUACC | 1031 | AUCAUAGGUAGCU | 1441 | 209-227 |
| 960689 | UAUGAUdTdT | | UUGUCAdTdT | | |
| AD- | GACAAAGCUACCU | 1032 | AAUCAUAGGUAGC | 1442 | 210-228 |
| 960690 | AUGAUUdTdT | | UUUGUCdTdT | | |
| AD- | ACAAAGCUACCUA | 1033 | AUAUCAUAGGUAG | 1443 | 211-229 |
| 960691 | UGAUAUdTdT | | CUUUGUdTdT | | |
| AD- | CAAAGCUACCUAU | 1034 | AUUAUCAUAGGUA | 1444 | 212-230 |
| 960692 | GAUAAUdTdT | | GCUUUGdTdT | | |
| AD- | AAAGCUACCUAUG | 1035 | AUUUAUCAUAGGU | 1445 | 213-231 |
| 960693 | AUAAAUdTdT | | AGCUUUdTdT | | |
| AD- | AAGCUACCUAUGA | 1036 | AGUUUAUCAUAGG | 1446 | 214-232 |
| 960694 | UAAACUdTdT | | UAGCUUdTdT | | |
| AD- | AGCUACCUAUGAU | 1037 | AAGUUUAUCAUAG | 1447 | 215-233 |
| 960695 | AAACUUdTdT | | GUAGCUdTdT | | |
| AD- | GCUACCUAUGAUA | 1038 | AGAGUUUAUCAUA | 1448 | 216-234 |
| 960696 | AACUCUdTdT | | GGUAGCdTdT | | |
| AD- | CUACCUAUGAUAA | 1039 | AAGAGUUUAUCAU | 1449 | 217-235 |
| 960697 | ACUCUUdTdT | | AGGUAGdTdT | | |
| AD- | UACCUAUGAUAAA | 1040 | ACAGAGUUUAUCA | 1450 | 218-236 |
| 960698 | CUCUGUdTdT | | UAGGUAdTdT | | |
| AD- | ACCUAUGAUAAAC | 1041 | AACAGAGUUUAUC | 1451 | 219-237 |
| 960699 | UCUGUUdTdT | | AUAGGUdTdT | | |
| AD- | CCUAUGAUAAACU | 1042 | AUACAGAGUUUAU | 1452 | 220-238 |
| 960700 | CUGUAUdTdT | | CAUAGGdTdT | | |
| AD- | CUAUGAUAAACUC | 1043 | AUUACAGAGUUUA | 1453 | 221-239 |
| 960701 | UGUAAUdTdT | | UCAUAGdTdT | | |
| AD- | UAUGAUAAACUCU | 1044 | ACUUACAGAGUUU | 1454 | 222-240 |
| 960702 | GUAAGUdTdT | | AUCAUAdTdT | | |
| AD- | AUGAUAAACUCUG | 1045 | ACCUUACAGAGUU | 1455 | 223-241 |
| 960703 | UAAGGUdTdT | | UAUCAUdTdT | | |
| AD- | UGAUAAACUCUGU | 1046 | AUCCUUACAGAGU | 1456 | 224-242 |
| 960704 | AAGGAUdTdT | | UUAUCAdTdT | | |
| AD- | GAUAAACUCUGUA | 1047 | AUUCCUUACAGAG | 1457 | 225-243 |
| 960705 | AGGAAUdTdT | | UUUAUCdTdT | | |
| AD- | AUAAACUCUGUAA | 1048 | ACUUCCUUACAGA | 1458 | 226-244 |
| 960706 | GGAAGUdTdT | | GUUUAUdTdT | | |
| AD- | UAAACUCUGUAAG | 1049 | AACUUCCUUACAG | 1459 | 227-245 |
| 960707 | GAAGUUdTdT | | AGUUUAdTdT | | |
| AD- | AAACUCUGUAAGG | 1050 | AAACUUCCUUACA | 1460 | 228-246 |
| 960708 | AAGUUUdTdT | | GAGUUUdTdT | | |
| AD- | AACUCUGUAAGGA | 1051 | AGAACUUCCUUAC | 1461 | 229-247 |
| 960709 | AGUUCUdTdT | | AGAGUUdTdT | | |
| AD- | ACUCUGUAAGGAA | 1052 | AGGAACUUCCUUA | 1462 | 230-248 |
| 960710 | GUUCCUdTdT | | CAGAGUdTdT | | |
| AD- | CUCUGUAAGGAAG | 1053 | AGGGAACUUCCUU | 1463 | 231-249 |
| 960711 | UUCCCUdTdT | | ACAGAGdTdT | | |
| AD- | UCUGUAAGGAAGU | 1054 | AUGGGAACUUCCU | 1464 | 232-250 |
| 960712 | UCCCAUdTdT | | UACAGAdTdT | | |
| AD- | CUGUAAGGAAGUU | 1055 | AUUGGGAACUUCC | 1465 | 233-251 |
| 960713 | CCCAAUdTdT | | UUACAGdTdT | | |
| AD- | UGUAAGGAAGUUC | 1056 | AGUUGGGAACUUC | 1466 | 234-252 |
| 960714 | CCAACUdTdT | | CUUACAdTdT | | |
| AD- | GUAAGGAAGUUCC | 1057 | AAGUUGGGAACUU | 1467 | 235-253 |
| 960715 | CAACUUdTdT | | CCUUACdTdT | | |
| AD- | UAAGGAAGUUCCC | 1058 | AUAGUUGGGAACU | 1468 | 236-254 |
| 960716 | AACUAUdTdT | | UCCUUAdTdT | | |
| AD- | AAGGAAGUUCCCA | 1059 | AAUAGUUGGGAAC | 1469 | 237-255 |
| 960717 | ACUAUUdTdT | | UUCCUUdTdT | | |
| AD- | AGGAAGUUCCCAA | 1060 | AUAUAGUUGGGAA | 1470 | 238-256 |
| 960718 | CUAUAUdTdT | | CUUCCUdTdT | | |
| AD- | GGAAGUUCCCAAC | 1061 | AUUAUAGUUGGGA | 1471 | 239-257 |
| 960719 | UAUAAUdTdT | | ACUUCCdTdT | | |
| AD- | GAAGUUCCCAACU | 1062 | AUUUAUAGUUGGG | 1472 | 240-258 |
| 960720 | AUAAAUdTdT | | AACUUCdTdT | | |
| AD- | AAGUUCCCAACUA | 1063 | AGUUUAUAGUUGG | 1473 | 241-259 |
| 960721 | UAAACUdTdT | | GAACUUdTdT | | |
| AD- | AGUUCCCAACUAU | 1064 | AAGUUUAUAGUUG | 1474 | 242-260 |
| 960722 | AAACUUdTdT | | GGAACUdTdT | | |
| AD- | GUUCCCAACUAUA | 1065 | AAAGUUUAUAGUU | 1475 | 243-261 |
| 960723 | AACUUUdTdT | | GGGAACdTdT | | |
| AD- | UUCCCAACUAUAA | 1066 | AUAAGUUUAUAGU | 1476 | 244-262 |
| 960724 | ACUUAUdTdT | | UGGGAAdTdT | | |
| AD- | UCCCAACUAUAAA | 1067 | AAUAAGUUUAUAG | 1477 | 245-263 |
| 960725 | CUUAUUdTdT | | UUGGGAdTdT | | |
| AD- | CCCAACUAUAAAC | 1068 | AUAUAAGUUUAUA | 1478 | 246-264 |
| 960726 | UUAUAUdTdT | | GUUGGGdTdT | | |
| AD- | CCAACUAUAAACU | 1069 | AUUAUAAGUUUAU | 1479 | 247-265 |
| 960727 | UAUAAUdTdT | | AGUUGGdTdT | | |
| AD- | CAACUAUAAACUU | 1070 | AGUUAUAAGUUUA | 1480 | 248-266 |
| 960728 | AUAACUdTdT | | UAGUUGdTdT | | |
| AD- | AACUAUAAACUUA | 1071 | AGGUUAUAAGUUU | 1481 | 249-267 |
| 960729 | UAACCUdTdT | | AUAGUUdTdT | | |
| AD- | CCCAGCUGUGGUC | 1072 | AUCAGAGACCACA | 1482 | 266-284 |
| 960730 | UCUGAUdTdT | | GCUGGGdTdT | | |
| AD- | CCAGCUGUGGUCU | 1073 | ACUCAGAGACCAC | 1483 | 267-285 |
| 960731 | CUGAGUdTdT | | AGCUGGdTdT | | |
| AD- | CAGCUGUGGUCUC | 1074 | AUCUCAGAGACCA | 1484 | 268-286 |
| 960732 | UGAGAUdTdT | | CAGCUGdTdT | | |
| AD- | AGCUGUGGUCUCU | 1075 | ACUCUCAGAGACC | 1485 | 269-287 |
| 960733 | GAGAGUdTdT | | ACAGCUdTdT | | |
| AD- | GCUGUGGUCUCUG | 1076 | AUCUCUCAGAGAC | 1486 | 270-288 |
| 960734 | AGAGAUdTdT | | CACAGCdTdT | | |
| AD- | CUGUGGUCUCUGA | 1077 | AGUCUCUCAGAGA | 1487 | 271-289 |
| 960735 | GAGACUdTdT | | CCACAGdTdT | | |
| AD- | UGUGGUCUCUGAG | 1078 | AAGUCUCUCAGAG | 1488 | 272-290 |
| 960736 | AGACUUdTdT | | ACCACAdTdT | | |
| AD- | GUGGUCUCUGAGA | 1079 | ACAGUCUCUCAGA | 1489 | 273-291 |
| 960737 | GACUGUdTdT | | GACCACdTdT | | |
| AD- | UGGUCUCUGAGAG | 1080 | AUCAGUCUCUCAG | 1490 | 274-292 |
| 960738 | ACUGAUdTdT | | AGACCAdTdT | | |
| AD- | GGUCUCUGAGAGA | 1081 | AUUCAGUCUCUCA | 1491 | 275-293 |
| 960739 | CUGAAUdTdT | | GAGACCdTdT | | |
| AD- | GUCUCUGAGAGAC | 1082 | ACUUCAGUCUCUC | 1492 | 276-294 |
| 960740 | UGAAGUdTdT | | AGAGACdTdT | | |
| AD- | UCUCUGAGAGACU | 1083 | AUCUUCAGUCUCU | 1493 | 277-295 |
| 960741 | GAAGAUdTdT | | CAGAGAdTdT | | |
| AD- | CUCUGAGAGACUG | 1084 | AAUCUUCAGUCUC | 1494 | 278-296 |
| 960742 | AAGAUUdTdT | | UCAGAGdTdT | | |
| AD- | UCUGAGAGACUGA | 1085 | AAAUCUUCAGUCU | 1495 | 279-297 |
| 960743 | AGAUUUdTdT | | CUCAGAdTdT | | |
| AD- | CUGAGAGACUGAA | 1086 | AGAAUCUUCAGUC | 1496 | 280-298 |
| 960744 | GAUUCUdTdT | | UCUCAGdTdT | | |
| AD- | UGAGAGACUGAAG | 1087 | ACGAAUCUUCAGU | 1497 | 281-299 |
| 960745 | AUUCGUdTdT | | CUCUCAdTdT | | |
| AD- | GAGAGACUGAAGA | 1088 | AUCGAAUCUUCAG | 1498 | 282-300 |
| 960746 | UUCGAUdTdT | | UCUCUCdTdT | | |
| AD- | AGAGACUGAAGAU | 1089 | ACUCGAAUCUUCA | 1499 | 283-301 |
| 960747 | UCGAGUdTdT | | GUCUCUdTdT | | |
| AD- | GAGACUGAAGAUU | 1090 | ACCUCGAAUCUUC | 1500 | 284-302 |
| 960748 | CGAGGUdTdT | | AGUCUCdTdT | | |
| AD- | AGACUGAAGAUUC | 1091 | AGCCUCGAAUCUU | 1501 | 285-303 |
| 960749 | GAGGCUdTdT | | CAGUCUdTdT | | |
| AD- | GACUGAAGAUUCG | 1092 | AAGCCUCGAAUCU | 1502 | 286-304 |
| 960750 | AGGCUUdTdT | | UCAGUCdTdT | | |
| AD- | ACUGAAGAUUCGA | 1093 | AGAGCCUCGAAUC | 1503 | 287-305 |
| 960751 | GGCUCUdTdT | | UUCAGUdTdT | | |
| AD- | CUGAAGAUUCGAG | 1094 | AGGAGCCUCGAAU | 1504 | 288-306 |
| 960752 | GCUCCUdTdT | | CUUCAGdTdT | | |
| AD- | UGAAGAUUCGAGG | 1095 | AGGGAGCCUCGAA | 1505 | 289-307 |
| 960753 | CUCCCUdTdT | | UCUUCAdTdT | | |
| AD- | GAAGAUUCGAGGC | 1096 | AAGGGAGCCUCGA | 1506 | 290-308 |
| 960754 | UCCCUUdTdT | | AUCUUCdTdT | | |
| AD- | AAGAUUCGAGGCU | 1097 | ACAGGGAGCCUCG | 1507 | 291-309 |
| 960755 | CCCUGUdTdT | | AAUCUUdTdT | | |
| AD- | AGAUUCGAGGCUC | 1098 | ACCAGGGAGCCUC | 1508 | 292-310 |
| 960756 | CCUGGUdTdT | | GAAUCUdTdT | | |
| AD- | GAUUCGAGGCUCC | 1099 | AGCCAGGGAGCCU | 1509 | 293-311 |
| 960757 | CUGGCUdTdT | | CGAAUCdTdT | | |
| AD- | AUUCGAGGCUCCC | 1100 | AGGCCAGGGAGCC | 1510 | 294-312 |
| 960758 | UGGCCUdTdT | | UCGAAUdTdT | | |
| AD- | UUCGAGGCUCCCU | 1101 | AUGGCCAGGGAGC | 1511 | 295-313 |
| 960759 | GGCCAUdTdT | | CUCGAAdTdT | | |
| AD- | UCGAGGCUCCCUG | 1102 | ACUGGCCAGGGAG | 1512 | 296-314 |
| 960760 | GCCAGUdTdT | | CCUCGAdTdT | | |
| AD- | CUGGCCAGGGCAG | 1103 | AAAGGGCUGCCCU | 1513 | 306-324 |
| 960761 | CCCUUUdTdT | | GGCCAGdTdT | | |
| AD- | UGGCCAGGGCAGC | 1104 | AGAAGGGCUGCCC | 1514 | 307-325 |
| 960762 | CCUUCUdTdT | | UGGCCAdTdT | | |
| AD- | GGCCAGGGCAGCC | 1105 | AUGAAGGGCUGCC | 1515 | 308-326 |
| 960763 | CUUCAUdTdT | | CUGGCCdTdT | | |
| AD- | GCCAGGGCAGCCC | 1106 | ACUGAAGGGCUGC | 1516 | 309-327 |
| 960764 | UUCAGUdTdT | | CCUGGCdTdT | | |
| AD- | CCAGGGCAGCCCU | 1107 | ACCUGAAGGGCUG | 1517 | 310-328 |
| 960765 | UCAGGUdTdT | | CCCUGGdTdT | | |
| AD- | CAGGGCAGCCCUU | 1108 | AUCCUGAAGGGCU | 1518 | 311-329 |
| 960766 | CAGGAUdTdT | | GCCCUGdTdT | | |
| AD- | AGGGCAGCCCUUC | 1109 | ACUCCUGAAGGGC | 1519 | 312-330 |
| 960767 | AGGAGUdTdT | | UGCCCUdTdT | | |
| AD- | GGGCAGCCCUUCA | 1110 | AGCUCCUGAAGGG | 1520 | 313-331 |
| 960768 | GGAGCUdTdT | | CUGCCCdTdT | | |
| AD- | GGCAGCCCUUCAG | 1111 | AAGCUCCUGAAGG | 1521 | 314-332 |
| 960769 | GAGCUUdTdT | | GCUGCCdTdT | | |
| AD- | GCAGCCCUUCAGG | 1112 | AGAGCUCCUGAAG | 1522 | 315-333 |
| 960770 | AGCUCUdTdT | | GGCUGCdTdT | | |
| AD- | CAGCCCUUCAGGA | 1113 | AGGAGCUCCUGAA | 1523 | 316-334 |
| 960771 | GCUCCUdTdT | | GGGCUGdTdT | | |
| AD- | AGCCCUUCAGGAG | 1114 | AAGGAGCUCCUGA | 1524 | 317-335 |
| 960772 | CUCCUUdTdT | | AGGGCUdTdT | | |
| AD- | GCCCUUCAGGAGC | 1115 | AAAGGAGCUCCUG | 1525 | 318-336 |
| 960773 | UCCUUUdTdT | | AAGGGCdTdT | | |
| AD- | CCCUUCAGGAGCU | 1116 | AUAAGGAGCUCCU | 1526 | 319-337 |
| 960774 | CCUUAUdTdT | | GAAGGGdTdT | | |
| AD- | CCUUCAGGAGCUC | 1117 | ACUAAGGAGCUCC | 1527 | 320-338 |
| 960775 | CUUAGUdTdT | | UGAAGGdTdT | | |
| AD- | CUUCAGGAGCUCC | 1118 | AACUAAGGAGCUC | 1528 | 321-339 |
| 960776 | UUAGUUdTdT | | CUGAAGdTdT | | |
| AD- | UUCAGGAGCUCCU | 1119 | AUACUAAGGAGCU | 1529 | 322-340 |
| 960777 | UAGUAUdTdT | | CCUGAAdTdT | | |
| AD- | UCAGGAGCUCCUU | 1120 | AUUACUAAGGAGC | 1530 | 323-341 |
| 960778 | AGUAAUdTdT | | UCCUGAdTdT | | |
| AD- | CAGGAGCUCCUUA | 1121 | AUUUACUAAGGAG | 1531 | 324-342 |
| 960779 | GUAAAUdTdT | | CUCCUGdTdT | | |
| AD- | AGGAGCUCCUUAG | 1122 | ACUUUACUAAGGA | 1532 | 325-343 |
| 960780 | UAAAGUdTdT | | GCUCCUdTdT | | |
| AD- | GGAGCUCCUUAGU | 1123 | ACCUUUACUAAGG | 1533 | 326-344 |
| 960781 | AAAGGUdTdT | | AGCUCCdTdT | | |
| AD- | GAGCUCCUUAGUA | 1124 | AUCCUUUACUAAG | 1534 | 327-345 |
| 960782 | AAGGAUdTdT | | GAGCUCdTdT | | |
| AD- | AGCUCCUUAGUAA | 1125 | AGUCCUUUACUAA | 1535 | 328-346 |
| 960783 | AGGACUdTdT | | GGAGCUdTdT | | |
| AD- | GCUCCUUAGUAAA | 1126 | AAGUCCUUUACUA | 1536 | 329-347 |
| 960784 | GGACUUdTdT | | AGGAGCdTdT | | |
| AD- | CUCCUUAGUAAAG | 1127 | AAAGUCCUUUACU | 1537 | 330-348 |
| 960785 | GACUUUdTdT | | AAGGAGdTdT | | |
| AD- | UCCUUAGUAAAGG | 1128 | AUAAGUCCUUUAC | 1538 | 331-349 |
| 960786 | ACUUAUdTdT | | UAAGGAdTdT | | |
| AD- | CCUUAGUAAAGGA | 1129 | AAUAAGUCCUUUA | 1539 | 332-350 |
| 960787 | CUUAUUdTdT | | CUAAGGdTdT | | |
| AD- | CUUAGUAAAGGAC | 1130 | AGAUAAGUCCUUU | 1540 | 333-351 |
| 960788 | UUAUCUdTdT | | ACUAAGdTdT | | |
| AD- | UUAGUAAAGGACU | 1131 | AUGAUAAGUCCUU | 1541 | 334-352 |
| 960789 | UAUCAUdTdT | | UACUAAdTdT | | |
| AD- | UAGUAAAGGACUU | 1132 | AUUGAUAAGUCCU | 1542 | 335-353 |
| 960790 | AUCAAUdTdT | | UUACUAdTdT | | |
| AD- | AGUAAAGGACUUA | 1133 | AUUUGAUAAGUCC | 1543 | 336-354 |
| 960791 | UCAAAUdTdT | | UUUACUdTdT | | |
| AD- | GUAAAGGACUUAU | 1134 | AGUUUGAUAAGUC | 1544 | 337-355 |
| 960792 | CAAACUdTdT | | CUUUACdTdT | | |
| AD- | UAAAGGACUUAUC | 1135 | AAGUUUGAUAAGU | 1545 | 338-356 |
| 960793 | AAACUUdTdT | | CCUUUAdTdT | | |
| AD- | AAAGGACUUAUCA | 1136 | ACAGUUUGAUAAG | 1546 | 339-357 |
| 960794 | AACUGUdTdT | | UCCUUUdTdT | | |
| AD- | AAGGACUUAUCAA | 1137 | ACCAGUUUGAUAA | 1547 | 340-358 |
| 960795 | ACUGGUdTdT | | GUCCUUdTdT | | |
| AD- | AGGACUUAUCAAA | 1138 | AACCAGUUUGAUA | 1548 | 341-359 |
| 960796 | CUGGUUdTdT | | AGUCCUdTdT | | |
| AD- | GGACUUAUCAAAC | 1139 | AAACCAGUUUGAU | 1549 | 342-360 |
| 960797 | UGGUUUdTdT | | AAGUCCdTdT | | |
| AD- | GACUUAUCAAACU | 1140 | AAAACCAGUUUGA | 1550 | 343-361 |
| 960798 | GGUUUUdTdT | | UAAGUCdTdT | | |
| AD- | ACUUAUCAAACUG | 1141 | AGAAACCAGUUUG | 1551 | 344-362 |
| 960799 | GUUUCUdTdT | | AUAAGUdTdT | | |
| AD- | CUUAUCAAACUGG | 1142 | AUGAAACCAGUUU | 1552 | 345-363 |
| 960800 | UUUCAUdTdT | | GAUAAGdTdT | | |
| AD- | UUAUCAAACUGGU | 1143 | AUUGAAACCAGUU | 1553 | 346-364 |
| 960801 | UUCAAUdTdT | | UGAUAAdTdT | | |
| AD- | UAUCAAACUGGUU | 1144 | AUUUGAAACCAGU | 1554 | 347-365 |
| 960802 | UCAAAUdTdT | | UUGAUAdTdT | | |
| AD- | AUCAAACUGGUUU | 1145 | ACUUUGAAACCAG | 1555 | 348-366 |
| 960803 | CAAAGUdTdT | | UUUGAUdTdT | | |
| AD- | UCAAACUGGUUUC | 1146 | AGCUUUGAAACCA | 1556 | 349-367 |
| 960804 | AAAGCUdTdT | | GUUUGAdTdT | | |
| AD- | CAAACUGGUUUCA | 1147 | AUGCUUUGAAACC | 1557 | 350-368 |
| 960805 | AAGCAUdTdT | | AGUUUGdTdT | | |
| AD- | AAACUGGUUUCAA | 1148 | AGUGCUUUGAAAC | 1558 | 351-369 |
| 960806 | AGCACUdTdT | | CAGUUUdTdT | | |
| AD- | AACUGGUUUCAAA | 1149 | AUGUGCUUUGAAA | 1559 | 352-370 |
| 960807 | GCACAUdTdT | | CCAGUUdTdT | | |
| AD- | ACUGGUUUCAAAG | 1150 | ACUGUGCUUUGAA | 1560 | 353-371 |
| 960808 | CACAGUdTdT | | ACCAGUdTdT | | |
| AD- | CUGGUUUCAAAGC | 1151 | AUCUGUGCUUUGA | 1561 | 354-372 |
| 960809 | ACAGAUdTdT | | AACCAGdTdT | | |
| AD- | UGGUUUCAAAGCA | 1152 | ACUCUGUGCUUUG | 1562 | 355-373 |
| 960810 | CAGAGUdTdT | | AAACCAdTdT | | |
| AD- | GGUUUCAAAGCAC | 1153 | AGCUCUGUGCUUU | 1563 | 356-374 |
| 960811 | AGAGCUdTdT | | GAAACCdTdT | | |
| AD- | GUUUCAAAGCACA | 1154 | AAGCUCUGUGCUU | 1564 | 357-375 |
| 960812 | GAGCUUdTdT | | UGAAACdTdT | | |
| AD- | UUUCAAAGCACAG | 1155 | AGAGCUCUGUGCU | 1565 | 358-376 |
| 960813 | AGCUCUdTdT | | UUGAAAdTdT | | |
| AD- | UUCAAAGCACAGA | 1156 | AUGAGCUCUGUGC | 1566 | 359-377 |
| 960814 | GCUCAUdTdT | | UUUGAAdTdT | | |
| AD- | UCAAAGCACAGAG | 1157 | AUUGAGCUCUGUG | 1567 | 360-378 |
| 960815 | CUCAAUdTdT | | CUUUGAdTdT | | |
| AD- | CAAAGCACAGAGC | 1158 | ACUUGAGCUCUGU | 1568 | 361-379 |
| 960816 | UCAAGUdTdT | | GCUUUGdTdT | | |
| AD- | AAAGCACAGAGCU | 1159 | AACUUGAGCUCUG | 1569 | 362-380 |
| 960817 | CAAGUUdTdT | | UGCUUUdTdT | | |
| AD- | AAGCACAGAGCUC | 1160 | AUACUUGAGCUCU | 1570 | 363-381 |
| 960818 | AAGUAUdTdT | | GUGCUUdTdT | | |
| AD- | AGCACAGAGCUCA | 1161 | AUUACUUGAGCUC | 1571 | 364-382 |
| 960819 | AGUAAUdTdT | | UGUGCUdTdT | | |
| AD- | GCACAGAGCUCAA | 1162 | AAUUACUUGAGCU | 1572 | 365-383 |
| 960820 | GUAAUUdTdT | | CUGUGCdTdT | | |
| AD- | CACAGAGCUCAAG | 1163 | AAAUUACUUGAGC | 1573 | 366-384 |
| 960821 | UAAUUUdTdT | | UCUGUGdTdT | | |
| AD- | ACAGAGCUCAAGU | 1164 | AAAAUUACUUGAG | 1574 | 367-385 |
| 960822 | AAUUUUdTdT | | CUCUGUdTdT | | |
| AD- | CAGAGCUCAAGUA | 1165 | AUAAAUUACUUGA | 1575 | 368-386 |
| 960823 | AUUUAUdTdT | | GCUCUGdTdT | | |
| AD- | AGAGCUCAAGUAA | 1166 | AGUAAAUUACUUG | 1576 | 369-387 |
| 960824 | UUUACUdTdT | | AGCUCUdTdT | | |
| AD- | GAGCUCAAGUAAU | 1167 | AUGUAAAUUACUU | 1577 | 370-388 |
| 960825 | UUACAUdTdT | | GAGCUCdTdT | | |
| AD- | AGCUCAAGUAAUU | 1168 | AGUGUAAAUUACU | 1578 | 371-389 |
| 960826 | UACACUdTdT | | UGAGCUdTdT | | |
| AD- | GCUCAAGUAAUUU | 1169 | AGGUGUAAAUUAC | 1579 | 372-390 |
| 960827 | ACACCUdTdT | | UUGAGCdTdT | | |
| AD- | CUCAAGUAAUUUA | 1170 | AUGGUGUAAAUUA | 1580 | 373-391 |
| 960828 | CACCAUdTdT | | CUUGAGdTdT | | |
| AD- | UCAAGUAAUUUAC | 1171 | ACUGGUGUAAAUU | 1581 | 374-392 |
| 960829 | ACCAGUdTdT | | ACUUGAdTdT | | |
| AD- | CAAGUAAUUUACA | 1172 | AUCUGGUGUAAAU | 1582 | 375-393 |
| 960830 | CCAGAUdTdT | | UACUUGdTdT | | |
| AD- | AAGUAAUUUACAC | 1173 | AUUCUGGUGUAAA | 1583 | 376-394 |
| 960831 | CAGAAUdTdT | | UUACUUdTdT | | |
| AD- | AGUAAUUUACACC | 1174 | AUUUCUGGUGUAA | 1584 | 377-395 |
| 960832 | AGAAAUdTdT | | AUUACUdTdT | | |
| AD- | GUAAUUUACACCA | 1175 | AAUUUCUGGUGUA | 1585 | 378-396 |
| 960833 | GAAAUUdTdT | | AAUUACdTdT | | |
| AD- | UAAUUUACACCAG | 1176 | AUAUUUCUGGUGU | 1586 | 379-397 |
| 960834 | AAAUAUdTdT | | AAAUUAdTdT | | |
| AD- | AAUUUACACCAGA | 1177 | AGUAUUUCUGGUG | 1587 | 380-398 |
| 960835 | AAUACUdTdT | | UAAAUUdTdT | | |
| AD- | AUUUACACCAGAA | 1178 | AGGUAUUUCUGGU | 1588 | 381-399 |
| 960836 | AUACCUdTdT | | GUAAAUdTdT | | |
| AD- | UUUACACCAGAAA | 1179 | AUGGUAUUUCUGG | 1589 | 382-400 |
| 960837 | UACCAUdTdT | | UGUAAAdTdT | | |
| AD- | UUACACCAGAAAU | 1180 | AUUGGUAUUUCUG | 1590 | 383-401 |
| 960838 | ACCAAUdTdT | | GUGUAAdTdT | | |
| AD- | UACACCAGAAAUA | 1181 | ACUUGGUAUUUCU | 1591 | 384-402 |
| 960839 | CCAAGUdTdT | | GGUGUAdTdT | | |
| AD- | ACACCAGAAAUAC | 1182 | ACCUUGGUAUUUC | 1592 | 385-403 |
| 960840 | CAAGGUdTdT | | UGGUGUdTdT | | |
| AD- | CACCAGAAAUACC | 1183 | ACCCUUGGUAUUU | 1593 | 386-404 |
| 960841 | AAGGGUdTdT | | CUGGUGdTdT | | |
| AD- | ACCAGAAAUACCA | 1184 | AACCCUUGGUAUU | 1594 | 387-405 |
| 960842 | AGGGUUdTdT | | UCUGGUdTdT | | |
| AD- | CCAGAAAUACCAA | 1185 | ACACCCUUGGUAU | 1595 | 388-406 |
| 960843 | GGGUGUdTdT | | UUCUGGdTdT | | |
| AD- | CAGAAAUACCAAG | 1186 | ACCACCCUUGGUA | 1596 | 389-407 |
| 960844 | GGUGGUdTdT | | UUUCUGdTdT | | |
| AD- | AGAAAUACCAAGG | 1187 | AUCCACCCUUGGU | 1597 | 390-408 |
| 960845 | GUGGAUdTdT | | AUUUCUdTdT | | |
| AD- | GAAAUACCAAGGG | 1188 | ACUCCACCCUUGG | 1598 | 391-409 |
| 960846 | UGGAGUdTdT | | UAUUUCdTdT | | |
| AD- | AAAUACCAAGGGU | 1189 | AUCUCCACCCUUG | 1599 | 392-410 |
| 960847 | GGAGAUdTdT | | GUAUUUdTdT | | |
| AD- | AAUACCAAGGGUG | 1190 | AAUCUCCACCCUU | 1600 | 393-411 |
| 960848 | GAGAUUdTdT | | GGUAUUdTdT | | |
| AD- | AUACCAAGGGUGG | 1191 | ACAUCUCCACCCU | 1601 | 394-412 |
| 960849 | AGAUGUdTdT | | UGGUAUdTdT | | |
| AD- | UACCAAGGGUGGA | 1192 | AGCAUCUCCACCC | 1602 | 395-413 |
| 960850 | GAUGCUdTdT | | UUGGUAdTdT | | |
| AD- | ACCAAGGGUGGAG | 1193 | AAGCAUCUCCACC | 1603 | 396-414 |
| 960851 | AUGCUUdTdT | | CUUGGUdTdT | | |
| AD- | CCAAGGGUGGAGA | 1194 | AGAGCAUCUCCAC | 1604 | 397-415 |
| 960852 | UGCUCUdTdT | | CCUUGGdTdT | | |
| AD- | CAAGGGUGGAGAU | 1195 | AGGAGCAUCUCCA | 1605 | 398-416 |
| 960853 | GCUCCUdTdT | | CCCUUGdTdT | | |
| AD- | AAGGGUGGAGAUG | 1196 | AUGGAGCAUCUCC | 1606 | 399-417 |
| 960854 | CUCCAUdTdT | | ACCCUUdTdT | | |
| AD- | AGGGUGGAGAUGC | 1197 | ACUGGAGCAUCUC | 1607 | 400-418 |
| 960855 | UCCAGUdTdT | | CACCCUdTdT | | |
| AD- | GGGUGGAGAUGCU | 1198 | AGCUGGAGCAUCU | 1608 | 401-419 |
| 960856 | CCAGCUdTdT | | CCACCCdTdT | | |
| AD- | GGUGGAGAUGCUC | 1199 | AAGCUGGAGCAUC | 1609 | 402-420 |
| 960857 | CAGCUUdTdT | | UCCACCdTdT | | |
| AD- | GUGGAGAUGCUCC | 1200 | ACAGCUGGAGCAU | 1610 | 403-421 |
| 960858 | AGCUGUdTdT | | CUCCACdTdT | | |
| AD- | UGGAGAUGCUCCA | 1201 | AGCAGCUGGAGCA | 1611 | 404-422 |
| 960859 | GCUGCUdTdT | | UCUCCAdTdT | | |
| AD- | GGAGAUGCUCCAG | 1202 | AAGCAGCUGGAGC | 1612 | 405-423 |
| 960860 | CUGCUUdTdT | | AUCUCCdTdT | | |
| AD- | GAGAUGCUCCAGC | 1203 | ACAGCAGCUGGAG | 1613 | 406-424 |
| 960861 | UGCUGUdTdT | | CAUCUCdTdT | | |
| AD- | AGAUGCUCCAGCU | 1204 | ACCAGCAGCUGGA | 1614 | 407-425 |
| 960862 | GCUGGUdTdT | | GCAUCUdTdT | | |
| AD- | GAUGCUCCAGCUG | 1205 | AACCAGCAGCUGG | 1615 | 408-426 |
| 960863 | CUGGUUdTdT | | AGCAUCdTdT | | |
| AD- | AUGCUCCAGCUGC | 1206 | ACACCAGCAGCUG | 1616 | 409-427 |
| 960864 | UGGUGUdTdT | | GAGCAUdTdT | | |
| AD- | UGCUCCAGCUGCU | 1207 | AUCACCAGCAGCU | 1617 | 410-428 |
| 960865 | GGUGAUdTdT | | GGAGCAdTdT | | |
| AD- | GCUCCAGCUGCUG | 1208 | AUUCACCAGCAGC | 1618 | 411-429 |
| 960866 | GUGAAUdTdT | | UGGAGCdTdT | | |
| AD- | CUCCAGCUGCUGG | 1209 | ACUUCACCAGCAG | 1619 | 412-430 |
| 960867 | UGAAGUdTdT | | CUGGAGdTdT | | |
| AD- | UCCAGCUGCUGGU | 1210 | AUCUUCACCAGCA | 1620 | 413-431 |
| 960868 | GAAGAUdTdT | | GCUGGAdTdT | | |
| AD- | CCAGCUGCUGGUG | 1211 | AAUCUUCACCAGC | 1621 | 414-432 |
| 960869 | AAGAUUdTdT | | AGCUGGdTdT | | |
| AD- | CAGCUGCUGGUGA | 1212 | ACAUCUUCACCAG | 1622 | 415-433 |
| 960870 | AGAUGUdTdT | | CAGCUGdTdT | | |
| AD- | AGCUGCUGGUGAA | 1213 | AGCAUCUUCACCA | 1623 | 416-434 |
| 960871 | GAUGCUdTdT | | GCAGCUdTdT | | |
| AD- | GCUGCUGGUGAAG | 1214 | AUGCAUCUUCACC | 1624 | 417-435 |
| 960872 | AUGCAUdTdT | | AGCAGCdTdT | | |
| AD- | CUGCUGGUGAAGA | 1215 | AAUGCAUCUUCAC | 1625 | 418-436 |
| 960873 | UGCAUUdTdT | | CAGCAGdTdT | | |
| AD- | UGCUGGUGAAGAU | 1216 | ACAUGCAUCUUCA | 1626 | 419-437 |
| 960874 | GCAUGUdTdT | | CCAGCAdTdT | | |
| AD- | GCUGGUGAAGAUG | 1217 | AUCAUGCAUCUUC | 1627 | 420-438 |
| 960875 | CAUGAUdTdT | | ACCAGCdTdT | | |
| AD- | CUGGUGAAGAUGC | 1218 | AUUCAUGCAUCUU | 1628 | 421-439 |
| 960876 | AUGAAUdTdT | | CACCAGdTdT | | |
| AD- | UGGUGAAGAUGCA | 1219 | AAUUCAUGCAUCU | 1629 | 422-440 |
| 960877 | UGAAUUdTdT | | UCACCAdTdT | | |
| AD- | GGUGAAGAUGCAU | 1220 | AUAUUCAUGCAUC | 1630 | 423-441 |
| 960878 | GAAUAUdTdT | | UUCACCdTdT | | |
| AD- | GUGAAGAUGCAUG | 1221 | ACUAUUCAUGCAU | 1631 | 424-442 |
| 960879 | AAUAGUdTdT | | CUUCACdTdT | | |
| AD- | UGAAGAUGCAUGA | 1222 | ACCUAUUCAUGCA | 1632 | 425-443 |
| 960880 | AUAGGUdTdT | | UCUUCAdTdT | | |
| AD- | GAAGAUGCAUGAA | 1223 | AACCUAUUCAUGC | 1633 | 426-444 |
| 960881 | UAGGUUdTdT | | AUCUUCdTdT | | |
| AD- | AAGAUGCAUGAAU | 1224 | AGACCUAUUCAUG | 1634 | 427-445 |
| 960882 | AGGUCUdTdT | | CAUCUUdTdT | | |
| AD- | AGAUGCAUGAAUA | 1225 | AGGACCUAUUCAU | 1635 | 428-446 |
| 960883 | GGUCCUdTdT | | GCAUCUdTdT | | |
| AD- | GAUGCAUGAAUAG | 1226 | AUGGACCUAUUCA | 1636 | 429-447 |
| 960884 | GUCCAUdTdT | | UGCAUCdTdT | | |
| AD- | AUGCAUGAAUAGG | 1227 | AUUGGACCUAUUC | 1637 | 430-448 |
| 960885 | UCCAAUdTdT | | AUGCAUdTdT | | |
| AD- | UGCAUGAAUAGGU | 1228 | AGUUGGACCUAUU | 1638 | 431-449 |
| 960886 | CCAACUdTdT | | CAUGCAdTdT | | |
| AD- | GCAUGAAUAGGUC | 1229 | AGGUUGGACCUAU | 1639 | 432-450 |
| 960887 | CAACCUdTdT | | UCAUGCdTdT | | |
| AD- | CAUGAAUAGGUCC | 1230 | AUGGUUGGACCUA | 1640 | 433-451 |
| 960888 | AACCAUdTdT | | UUCAUGdTdT | | |
| AD- | AUGAAUAGGUCCA | 1231 | ACUGGUUGGACCU | 1641 | 434-452 |
| 960889 | ACCAGUdTdT | | AUUCAUdTdT | | |
| AD- | UGAAUAGGUCCAA | 1232 | AGCUGGUUGGACC | 1642 | 435-453 |
| 960890 | CCAGCUdTdT | | UAUUCAdTdT | | |
| AD- | GAAUAGGUCCAAC | 1233 | AAGCUGGUUGGAC | 1643 | 436-454 |
| 960891 | CAGCUUdTdT | | CUAUUCdTdT | | |
| AD- | AAUAGGUCCAACC | 1234 | ACAGCUGGUUGGA | 1644 | 437-455 |
| 960892 | AGCUGUdTdT | | CCUAUUdTdT | | |
| AD- | AUAGGUCCAACCA | 1235 | AACAGCUGGUUGG | 1645 | 438-456 |
| 960893 | GCUGUUdTdT | | ACCUAUdTdT | | |
| AD- | UAGGUCCAACCAG | 1236 | AUACAGCUGGUUG | 1646 | 439-457 |
| 960894 | CUGUAUdTdT | | GACCUAdTdT | | |
| AD- | AGGUCCAACCAGC | 1237 | AGUACAGCUGGUU | 1647 | 440-458 |
| 960895 | UGUACUdTdT | | GGACCUdTdT | | |
| AD- | GGUCCAACCAGCU | 1238 | AUGUACAGCUGGU | 1648 | 441-459 |
| 960896 | GUACAUdTdT | | UGGACCdTdT | | |
| AD- | GUCCAACCAGCUG | 1239 | AAUGUACAGCUGG | 1649 | 442-460 |
| 960897 | UACAUUdTdT | | UUGGACdTdT | | |
| AD- | UCCAACCAGCUGU | 1240 | AAAUGUACAGCUG | 1650 | 443-461 |
| 960898 | ACAUUUdTdT | | GUUGGAdTdT | | |
| AD- | CCAACCAGCUGUA | 1241 | AAAAUGUACAGCU | 1651 | 444-462 |
| 960899 | CAUUUUdTdT | | GGUUGGdTdT | | |
| AD- | CAACCAGCUGUAC | 1242 | ACAAAUGUACAGC | 1652 | 445-463 |
| 960900 | AUUUGUdTdT | | UGGUUGdTdT | | |
| AD- | AACCAGCUGUACA | 1243 | ACCAAAUGUACAG | 1653 | 446-464 |
| 960901 | UUUGGUdTdT | | CUGGUUdTdT | | |
| AD- | ACCAGCUGUACAU | 1244 | AUCCAAAUGUACA | 1654 | 447-465 |
| 960902 | UUGGAUdTdT | | GCUGGUdTdT | | |
| AD- | CCAGCUGUACAUU | 1245 | AUUCCAAAUGUAC | 1655 | 448-466 |
| 960903 | UGGAAUdTdT | | AGCUGGdTdT | | |
| AD- | CAGCUGUACAUUU | 1246 | AUUUCCAAAUGUA | 1656 | 449-467 |
| 960904 | GGAAAUdTdT | | CAGCUGdTdT | | |
| AD- | AGCUGUACAUUUG | 1247 | AUUUUCCAAAUGU | 1657 | 450-468 |
| 960905 | GAAAAUdTdT | | ACAGCUdTdT | | |
| AD- | GCUGUACAUUUGG | 1248 | AUUUUUCCAAAUG | 1658 | 451-469 |
| 960906 | AAAAAUdTdT | | UACAGCdTdT | | |
| AD- | CUGUACAUUUGGA | 1249 | AAUUUUUCCAAAU | 1659 | 452-470 |
| 960907 | AAAAUUdTdT | | GUACAGdTdT | | |
| AD- | UGUACAUUUGGAA | 1250 | AUAUUUUUCCAAA | 1660 | 453-471 |
| 960908 | AAAUAUdTdT | | UGUACAdTdT | | |
| AD- | GUACAUUUGGAAA | 1251 | AUUAUUUUUCCAA | 1661 | 454-472 |
| 960909 | AAUAAUdTdT | | AUGUACdTdT | | |
| AD- | CAUUUGGAAAAAU | 1252 | AGUUUUAUUUUUC | 1662 | 457-475 |
| 960910 | AAAACUdTdT | | CAAAUGdTdT | | |

TABLE 4
RPS25 Unmodified duplex Sequences

| Start | End | | | | | | |
|---|---|---|---|---|---|---|---|
| Site in | Site in | Sense | SEQ | Antisense | SEQ | | SEQ |
| NM_ | NM_ | Oligo Sequence | ID | Oligo Sequence | ID | Target Sequence | ID |
| 001028.3 | 00128.3 | 5’ to 3’ | NO: | 5’ to 3’ | NO: | 5’ to 3’ | NO: |
| 1 | 19 | CUUUUUGUCCGACAUCUUG | 1663 | CAAGAUGUCGGACAAAAAG | 1774 | CTTTTTGTCCGACATCTTG | 1885 |
| 3 | 21 | UUUUGUCCGACAUCUUGAC | 1664 | GUCAAGAUGUCGGACAAAA | 1775 | TTTTGTCCGACATCTTGAC | 1886 |
| 6 | 24 | UGUCCGACAUCUUGACGAG | 1665 | CUCGUCAAGAUGUCGGACA | 1776 | TGTCCGACATCTTGACGAG | 1887 |
| 9 | 27 | CCGACAUCUUGACGAGGCU | 31 | AGCCUCGUCAAGAUGUCGG | 441 | CCGACATCTTGACGAGGCT | 1888 |
| 12 | 30 | ACAUCUUGACGAGGCUGCG | 1666 | CGCAGCCUCGUCAAGAUGU | 1777 | ACATCTTGACGAGGCTGCG | 1889 |
| 16 | 34 | CUUGACGAGGCUGCGGUGU | 38 | ACACCGCAGCCUCGUCAAG | 448 | CTTGACGAGGCTGCGGTGT | 1890 |
| 22 | 40 | GAGGCUGCGGUGUCUGCUG | 1667 | CAGCAGACACCGCAGCCUC | 1778 | GAGGCTGCGGTGTCTGCTG | 1891 |
| 25 | 43 | GCUGCGGUGUCUGCUGCUA | 1668 | UAGCAGCAGACACCGCAGC | 1779 | GCTGCGGTGTCTGCTGCTA | 1892 |
| 29 | 47 | CGGUGUCUGCUGCUAUUCU | 51 | AGAAUAGCAGCAGACACCG | 461 | CGGTGTCTGCTGCTATTCT | 1893 |
| 31 | 49 | GUGUCUGCUGCUAUUCUCC | 1669 | GGAGAAUAGCAGCAGACAC | 1780 | GTGTCTGCTGCTATTCTCC | 1894 |
| 33 | 51 | GUCUGCUGCUAUUCUCCGA | 1670 | UCGGAGAAUAGCAGCAGAC | 1781 | GTCTGCTGCTATTCTCCGA | 1895 |
| 37 | 55 | GCUGCUAUUCUCCGAGCUU | 59 | AAGCUCGGAGAAUAGCAGC | 469 | GCTGCTATTCTCCGAGCTT | 1896 |
| 42 | 60 | UAUUCUCCGAGCUUCGCAA | 1671 | UUGCGAAGCUCGGAGAAUA | 1782 | TATTCTCCGAGCTTCGCAA | 1897 |
| 45 | 63 | UCUCCGAGCUUCGCAAUGC | 1672 | GCAUUGCGAAGCUCGGAGA | 1783 | TCTCCGAGCTTCGCAATGC | 1898 |
| 48 | 66 | CCGAGCUUCGCAAUGCCGC | 1673 | GCGGCAUUGCGAAGCUCGG | 1784 | CCGAGCTTCGCAATGCCGC | 1899 |
| 53 | 71 | CUUCGCAAUGCCGCCUAAG | 1674 | CUUAGGCGGCAUUGCGAAG | 1785 | CTTCGCAATGCCGCCTAAG | 1900 |
| 54 | 72 | UUCGCAAUGCCGCCUAAGG | 1675 | CCUUAGGCGGCAUUGCGAA | 1786 | TTCGCAATGCCGCCTAAGG | 1901 |
| 60 | 78 | AUGCCGCCUAAGGACGACA | 1676 | UGUCGUCCUUAGGCGGCAU | 1787 | ATGCCGCCTAAGGACGACA | 1902 |
| 62 | 80 | GCCGCCUAAGGACGACAAG | 1677 | CUUGUCGUCCUUAGGCGGC | 1788 | GCCGCCTAAGGACGACAAG | 1903 |
| 64 | 82 | CGCCUAAGGACGACAAGAA | 1678 | UUCUUGUCGUCCUUAGGCG | 1789 | CGCCTAAGGACGACAAGAA | 1904 |
| 70 | 88 | AGGACGACAAGAAGAAGAA | 1679 | UUCUUCUUCUUGUCGUCCU | 1790 | AGGACGACAAGAAGAAGAA | 2520 |
| 71 | 89 | GGACGACAAGAAGAAGAAG | 1680 | CUUCUUCUUCUUGUCGUCC | 1791 | GGACGACAAGAAGAAGAAG | 2521 |
| 76 | 94 | ACAAGAAGAAGAAGGACGC | 1681 | GCGUCCUUCUUCUUCUUGU | 1792 | ACAAGAAGAAGAAGGACGC | 2522 |
| 79 | 97 | AGAAGAAGAAGGACGCUGG | 1682 | CCAGCGUCCUUCUUCUUCU | 1793 | AGAAGAAGAAGGACGCTGG | 1905 |
| 83 | 101 | GAAGAAGGACGCUGGAAAG | 1683 | CUUUCCAGCGUCCUUCUUC | 1794 | GAAGAAGGACGCTGGAAAG | 1906 |
| 85 | 103 | AGAAGGACGCUGGAAAGUC | 1684 | GACUUUCCAGCGUCCUUCU | 1795 | AGAAGGACGCTGGAAAGTC | 1907 |
| 91 | 109 | ACGCUGGAAAGUCGGCCAA | 1685 | UUGGCCGACUUUCCAGCGU | 1796 | ACGCTGGAAAGTCGGCCAA | 1908 |
| 94 | 112 | CUGGAAAGUCGGCCAAGAA | 1686 | UUCUUGGCCGACUUUCCAG | 1797 | CTGGAAAGTCGGCCAAGAA | 1909 |
| 96 | 114 | GGAAAGUCGGCCAAGAAAG | 1687 | CUUUCUUGGCCGACUUUCC | 1798 | GGAAAGTCGGCCAAGAAAG | 1910 |
| 101 | 119 | GUCGGCCAAGAAAGACAAA | 1688 | UUUGUCUUUCUUGGCCGAC | 1799 | GTCGGCCAAGAAAGACAAA | 1911 |
| 103 | 121 | CGGCCAAGAAAGACAAAGA | 1689 | UCUUUGUCUUUCUUGGCCG | 1800 | CGGCCAAGAAAGACAAAGA | 2523 |
| 107 | 125 | CAAGAAAGACAAAGACCCA | 1690 | UGGGUCUUUGUCUUUCUUG | 1801 | CAAGAAAGACAAAGACCCA | 2524 |
| 109 | 127 | AGAAAGACAAAGACCCAGU | 130 | ACUGGGUCUUUGUCUUUCU | 540 | AGAAAGACAAAGACCCAGT | 1912 |
| 115 | 133 | ACAAAGACCCAGUGAACAA | 1691 | UUGUUCACUGGGUCUUUGU | 1802 | ACAAAGACCCAGTGAACAA | 1913 |
| 116 | 134 | CAAAGACCCAGUGAACAAA | 1692 | UUUGUUCACUGGGUCUUUG | 1803 | CAAAGACCCAGTGAACAAA | 1914 |
| 120 | 138 | GACCCAGUGAACAAAUCCG | 1693 | CGGAUUUGUUCACUGGGUC | 1804 | GACCCAGTGAACAAATCCG | 1915 |
| 125 | 143 | AGUGAACAAAUCCGGGGGC | 1694 | GCCCCCGGAUUUGUUCACU | 1805 | AGTGAACAAATCCGGGGGC | 1916 |
| 127 | 145 | UGAACAAAUCCGGGGGCAA | 1695 | UUGCCCCCGGAUUUGUUCA | 1806 | TGAACAAATCCGGGGGCAA | 1917 |
| 130 | 148 | ACAAAUCCGGGGGCAAGGC | 1696 | GCCUUGCCCCCGGAUUUGU | 1807 | ACAAATCCGGGGGCAAGGC | 1918 |
| 136 | 154 | CCGGGGGCAAGGCCAAAAA | 1697 | UUUUUGGCCUUGCCCCCGG | 1808 | CCGGGGGCAAGGCCAAAAA | 2525 |
| 140 | 158 | GGGCAAGGCCAAAAAGAAG | 1698 | CUUCUUUUUGGCCUUGCCC | 1809 | GGGCAAGGCCAAAAAGAAG | 2526 |
| 142 | 160 | GCAAGGCCAAAAAGAAGAA | 1699 | UUCUUCUUUUUGGCCUUGC | 1810 | GCAAGGCCAAAAAGAAGAA | 2527 |
| 146 | 164 | GGCCAAAAAGAAGAAGUGG | 1700 | CCACUUCUUCUUUUUGGCC | 1811 | GGCCAAAAAGAAGAAGTGG | 1919 |
| 148 | 166 | CCAAAAAGAAGAAGUGGUC | 1701 | GACCACUUCUUCUUUUUGG | 1812 | CCAAAAAGAAGAAGTGGTC | 1920 |
| 151 | 169 | AAAAGAAGAAGUGGUCCAA | 1702 | UUGGACCACUUCUUCUUUU | 1813 | AAAAGAAGAAGTGGTCCAA | 1921 |
| 154 | 172 | AGAAGAAGUGGUCCAAAGG | 1703 | CCUUUGGACCACUUCUUCU | 1814 | AGAAGAAGTGGTCCAAAGG | 1922 |
| 160 | 178 | AGUGGUCCAAAGGCAAAGU | 162 | ACUUUGCCUUUGGACCACU | 572 | AGTGGTCCAAAGGCAAAGT | 1923 |
| 163 | 181 | GGUCCAAAGGCAAAGUUCG | 1704 | CGAACUUUGCCUUUGGACC | 1815 | GGTCCAAAGGCAAAGTTCG | 1924 |
| 165 | 183 | UCCAAAGGCAAAGUUCGGG | 1705 | CCCGAACUUUGCCUUUGGA | 1816 | TCCAAAGGCAAAGTTCGGG | 1925 |
| 169 | 187 | AAGGCAAAGUUCGGGACAA | 1706 | UUGUCCCGAACUUUGCCUU | 1817 | AAGGCAAAGTTCGGGACAA | 1926 |
| 173 | 191 | CAAAGUUCGGGACAAGCUC | 1707 | GAGCUUGUCCCGAACUUUG | 1818 | CAAAGTTCGGGACAAGCTC | 1927 |
| 178 | 196 | UUCGGGACAAGCUCAAUAA | 1708 | UUAUUGAGCUUGUCCCGAA | 1819 | TTCGGGACAAGCTCAATAA | 1928 |
| 181 | 199 | GGGACAAGCUCAAUAACUU | 183 | AAGUUAUUGAGCUUGUCCC | 593 | GGGACAAGCTCAATAACTT | 1929 |
| 182 | 200 | GGACAAGCUCAAUAACUUA | 1709 | UAAGUUAUUGAGCUUGUCC | 1820 | GGACAAGCTCAATAACTTA | 1930 |
| 188 | 206 | GCUCAAUAACUUAGUCUUG | 1710 | CAAGACUAAGUUAUUGAGC | 1821 | GCTCAATAACTTAGTCTTG | 1931 |
| 189 | 207 | CUCAAUAACUUAGUCUUGU | 191 | ACAAGACUAAGUUAUUGAG | 601 | CTCAATAACTTAGTCTTGT | 1932 |
| 192 | 210 | AAUAACUUAGUCUUGUUUG | 1711 | CAAACAAGACUAAGUUAUU | 1822 | AATAACTTAGTCTTGTTTG | 1933 |
| 197 | 215 | CUUAGUCUUGUUUGACAAA | 1712 | UUUGUCAAACAAGACUAAG | 1823 | CTTAGTCTTGTTTGACAAA | 1934 |
| 200 | 218 | AGUCUUGUUUGACAAAGCU | 202 | AGCUUUGUCAAACAAGACU | 612 | AGTCTTGTTTGACAAAGCT | 1935 |
| 203 | 221 | CUUGUUUGACAAAGCUACC | 1713 | GGUAGCUUUGUCAAACAAG | 1824 | CTTGTTTGACAAAGCTACC | 1936 |
| 206 | 224 | GUUUGACAAAGCUACCUAU | 208 | AUAGGUAGCUUUGUCAAAC | 618 | GTTTGACAAAGCTACCTAT | 1937 |
| 212 | 230 | CAAAGCUACCUAUGAUAAA | 1714 | UUUAUCAUAGGUAGCUUUG | 1825 | CAAAGCTACCTATGATAAA | 1938 |
| 216 | 234 | GCUACCUAUGAUAAACUCU | 218 | AGAGUUUAUCAUAGGUAGC | 628 | GCTACCTATGATAAACTCT | 1939 |
| 217 | 235 | CUACCUAUGAUAAACUCUG | 1715 | CAGAGUUUAUCAUAGGUAG | 1826 | CTACCTATGATAAACTCTG | 1940 |
| 220 | 238 | CCUAUGAUAAACUCUGUAA | 1716 | UUACAGAGUUUAUCAUAGG | 1827 | CCTATGATAAACTCTGTAA | 1941 |
| 224 | 242 | UGAUAAACUCUGUAAGGAA | 1717 | UUCCUUACAGAGUUUAUCA | 1828 | TGATAAACTCTGTAAGGAA | 1942 |
| 229 | 247 | AACUCUGUAAGGAAGUUCC | 1718 | GGAACUUCCUUACAGAGUU | 1829 | AACTCTGTAAGGAAGTTCC | 1943 |
| 231 | 249 | CUCUGUAAGGAAGUUCCCA | 1719 | UGGGAACUUCCUUACAGAG | 1830 | CTCTGTAAGGAAGTTCCCA | 1944 |
| 236 | 254 | UAAGGAAGUUCCCAACUAU | 238 | AUAGUUGGGAACUUCCUUA | 648 | TAAGGAAGTTCCCAACTAT | 1945 |
| 239 | 257 | GGAAGUUCCCAACUAUAAA | 1720 | UUUAUAGUUGGGAACUUCC | 1831 | GGAAGTTCCCAACTATAAA | 1946 |
| 243 | 261 | GUUCCCAACUAUAAACUUA | 1721 | UAAGUUUAUAGUUGGGAAC | 1832 | GTTCCCAACTATAAACTTA | 1947 |
| 245 | 263 | UCCCAACUAUAAACUUAUA | 1722 | UAUAAGUUUAUAGUUGGGA | 1833 | TCCCAACTATAAACTTATA | 1948 |
| 248 | 266 | CAACUAUAAACUUAUAACC | 1723 | GGUUAUAAGUUUAUAGUUG | 1834 | CAACTATAAACTTATAACC | 1949 |
| 254 | 272 | UAAACUUAUAACCCCAGCU | 1724 | AGCUGGGGUUAUAAGUUUA | 1835 | TAAACTTATAACCCCAGCT | 1950 |
| 255 | 273 | AAACUUAUAACCCCAGCUG | 1725 | CAGCUGGGGUUAUAAGUUU | 1836 | AAACTTATAACCCCAGCTG | 1951 |
| 258 | 276 | CUUAUAACCCCAGCUGUGG | 1726 | CCACAGCUGGGGUUAUAAG | 1837 | CTTATAACCCCAGCTGTGG | 1952 |
| 264 | 282 | ACCCCAGCUGUGGUCUCUG | 1727 | CAGAGACCACAGCUGGGGU | 1838 | ACCCCAGCTGTGGTCTCTG | 1953 |
| 267 | 285 | CCAGCUGUGGUCUCUGAGA | 1728 | UCUCAGAGACCACAGCUGG | 1839 | CCAGCTGTGGTCTCTGAGA | 1954 |
| 271 | 289 | CUGUGGUCUCUGAGAGACU | 257 | AGUCUCUCAGAGACCACAG | 667 | CTGTGGTCTCTGAGAGACT | 1955 |
| 274 | 292 | UGGUCUCUGAGAGACUGAA | 1729 | UUCAGUCUCUCAGAGACCA | 1840 | TGGTCTCTGAGAGACTGAA | 1956 |
| 278 | 296 | CUCUGAGAGACUGAAGAUU | 264 | AAUCUUCAGUCUCUCAGAG | 674 | CTCTGAGAGACTGAAGATT | 1957 |
| 279 | 297 | UCUGAGAGACUGAAGAUUC | 1730 | GAAUCUUCAGUCUCUCAGA | 1841 | TCTGAGAGACTGAAGATTC | 1958 |
| 282 | 300 | GAGAGACUGAAGAUUCGAG | 1731 | CUCGAAUCUUCAGUCUCUC | 1842 | GAGAGACTGAAGATTCGAG | 1959 |
| 287 | 305 | ACUGAAGAUUCGAGGCUCC | 1732 | GGAGCCUCGAAUCUUCAGU | 1843 | ACTGAAGATTCGAGGCTCC | 1960 |
| 289 | 307 | UGAAGAUUCGAGGCUCCCU | 275 | AGGGAGCCUCGAAUCUUCA | 685 | TGAAGATTCGAGGCTCCCT | 1961 |
| 293 | 311 | GAUUCGAGGCUCCCUGGCC | 1733 | GGCCAGGGAGCCUCGAAUC | 1844 | GATTCGAGGCTCCCTGGCC | 1962 |
| 298 | 316 | GAGGCUCCCUGGCCAGGGC | 1734 | GCCCUGGCCAGGGAGCCUC | 1845 | GAGGCTCCCTGGCCAGGGC | 1963 |
| 302 | 320 | CUCCCUGGCCAGGGCAGCC | 1735 | GGCUGCCCUGGCCAGGGAG | 1846 | CTCCCTGGCCAGGGCAGCC | 1964 |
| 306 | 324 | CUGGCCAGGGCAGCCCUUC | 1736 | GAAGGGCUGCCCUGGCCAG | 1847 | CTGGCCAGGGCAGCCCTTC | 1965 |
| 308 | 326 | GGCCAGGGCAGCCCUUCAG | 1737 | CUGAAGGGCUGCCCUGGCC | 1848 | GGCCAGGGCAGCCCTTCAG | 1966 |
| 313 | 331 | GGGCAGCCCUUCAGGAGCU | 290 | AGCUCCUGAAGGGCUGCCC | 700 | GGGCAGCCCTTCAGGAGCT | 1967 |
| 316 | 334 | CAGCCCUUCAGGAGCUCCU | 293 | AGGAGCUCCUGAAGGGCUG | 703 | CAGCCCTTCAGGAGCTCCT | 1968 |
| 318 | 336 | GCCCUUCAGGAGCUCCUUA | 1738 | UAAGGAGCUCCUGAAGGGC | 1849 | GCCCTTCAGGAGCTCCTTA | 1969 |
| 323 | 341 | UCAGGAGCUCCUUAGUAAA | 1739 | UUUACUAAGGAGCUCCUGA | 1850 | TCAGGAGCTCCTTAGTAAA | 1970 |
| 326 | 344 | GGAGCUCCUUAGUAAAGGA | 1740 | UCCUUUACUAAGGAGCUCC | 1851 | GGAGCTCCTTAGTAAAGGA | 1971 |
| 330 | 348 | CUCCUUAGUAAAGGACUUA | 1741 | UAAGUCCUUUACUAAGGAG | 1852 | CTCCTTAGTAAAGGACTTA | 1972 |
| 333 | 351 | CUUAGUAAAGGACUUAUCA | 1742 | UGAUAAGUCCUUUACUAAG | 1853 | CTTAGTAAAGGACTTATCA | 1973 |
| 335 | 353 | UAGUAAAGGACUUAUCAAA | 1743 | UUUGAUAAGUCCUUUACUA | 1854 | TAGTAAAGGACTTATCAAA | 1974 |
| 340 | 358 | AAGGACUUAUCAAACUGGU | 317 | ACCAGUUUGAUAAGUCCUU | 727 | AAGGACTTATCAAACTGGT | 1975 |
| 343 | 361 | GACUUAUCAAACUGGUUUC | 1744 | GAAACCAGUUUGAUAAGUC | 1855 | GACTTATCAAACTGGTTTC | 1976 |
| 345 | 363 | CUUAUCAAACUGGUUUCAA | 1745 | UUGAAACCAGUUUGAUAAG | 1856 | CTTATCAAACTGGTTTCAA | 1977 |
| 348 | 366 | AUCAAACUGGUUUCAAAGC | 1746 | GCUUUGAAACCAGUUUGAU | 1857 | ATCAAACTGGTTTCAAAGC | 1978 |
| 353 | 371 | ACUGGUUUCAAAGCACAGA | 1747 | UCUGUGCUUUGAAACCAGU | 1858 | ACTGGTTTCAAAGCACAGA | 1979 |
| 358 | 376 | UUUCAAAGCACAGAGCUCA | 1748 | UGAGCUCUGUGCUUUGAAA | 1859 | TTTCAAAGCACAGAGCTCA | 1980 |
| 359 | 377 | UUCAAAGCACAGAGCUCAA | 1749 | UUGAGCUCUGUGCUUUGAA | 1860 | TTCAAAGCACAGAGCTCAA | 1981 |
| 365 | 383 | GCACAGAGCUCAAGUAAUU | 342 | AAUUACUUGAGCUCUGUGC | 752 | GCACAGAGCTCAAGTAATT | 1982 |
| 368 | 386 | CAGAGCUCAAGUAAUUUAC | 1750 | GUAAAUUACUUGAGCUCUG | 1861 | CAGAGCTCAAGTAATTTAC | 1983 |
| 369 | 387 | AGAGCUCAAGUAAUUUACA | 1751 | UGUAAAUUACUUGAGCUCU | 1862 | AGAGCTCAAGTAATTTACA | 1984 |
| 373 | 391 | CUCAAGUAAUUUACACCAG | 1752 | CUGGUGUAAAUUACUUGAG | 1863 | CTCAAGTAATTTACACCAG | 1985 |
| 378 | 396 | GUAAUUUACACCAGAAAUA | 1753 | UAUUUCUGGUGUAAAUUAC | 1864 | GTAATTTACACCAGAAATA | 1986 |
| 379 | 397 | UAAUUUACACCAGAAAUAC | 1754 | GUAUUUCUGGUGUAAAUUA | 1865 | TAATTTACACCAGAAATAC | 1987 |
| 384 | 402 | UACACCAGAAAUACCAAGG | 1755 | CCUUGGUAUUUCUGGUGUA | 1866 | TACACCAGAAATACCAAGG | 1988 |
| 387 | 405 | ACCAGAAAUACCAAGGGUG | 1756 | CACCCUUGGUAUUUCUGGU | 1867 | ACCAGAAATACCAAGGGTG | 1989 |
| 390 | 408 | AGAAAUACCAAGGGUGGAG | 1757 | CUCCACCCUUGGUAUUUCU | 1868 | AGAAATACCAAGGGTGGAG | 1990 |
| 393 | 411 | AAUACCAAGGGUGGAGAUG | 1758 | CAUCUCCACCCUUGGUAUU | 1869 | AATACCAAGGGTGGAGATG | 1991 |
| 399 | 417 | AAGGGUGGAGAUGCUCCAG | 1759 | CUGGAGCAUCUCCACCCUU | 1870 | AAGGGTGGAGATGCTCCAG | 1992 |
| 402 | 420 | GGUGGAGAUGCUCCAGCUG | 1760 | CAGCUGGAGCAUCUCCACC | 1871 | GGTGGAGATGCTCCAGCTG | 1993 |
| 404 | 422 | UGGAGAUGCUCCAGCUGCU | 381 | AGCAGCUGGAGCAUCUCCA | 791 | TGGAGATGCTCCAGCTGCT | 1994 |
| 410 | 428 | UGCUCCAGCUGCUGGUGAA | 1761 | UUCACCAGCAGCUGGAGCA | 1872 | TGCTCCAGCTGCTGGTGAA | 1995 |
| 411 | 429 | GCUCCAGCUGCUGGUGAAG | 1762 | CUUCACCAGCAGCUGGAGC | 1873 | GCTCCAGCTGCTGGTGAAG | 1996 |
| 417 | 435 | GCUGCUGGUGAAGAUGCAU | 394 | AUGCAUCUUCACCAGCAGC | 804 | GCTGCTGGTGAAGATGCAT | 1997 |
| 419 | 437 | UGCUGGUGAAGAUGCAUGA | 1763 | UCAUGCAUCUUCACCAGCA | 1874 | TGCTGGTGAAGATGCATGA | 1998 |
| 423 | 441 | GGUGAAGAUGCAUGAAUAG | 1764 | CUAUUCAUGCAUCUUCACC | 1875 | GGTGAAGATGCATGAATAG | 1999 |
| 426 | 444 | GAAGAUGCAUGAAUAGGUC | 1765 | GACCUAUUCAUGCAUCUUC | 1876 | GAAGATGCATGAATAGGTC | 2000 |
| 430 | 448 | AUGCAUGAAUAGGUCCAAC | 1766 | GUUGGACCUAUUCAUGCAU | 1877 | ATGCATGAATAGGTCCAAC | 2001 |
| 432 | 450 | GCAUGAAUAGGUCCAACCA | 1767 | UGGUUGGACCUAUUCAUGC | 1878 | GCATGAATAGGTCCAACCA | 2002 |
| 435 | 453 | UGAAUAGGUCCAACCAGCU | 412 | AGCUGGUUGGACCUAUUCA | 822 | TGAATAGGTCCAACCAGCT | 2003 |
| 441 | 459 | GGUCCAACCAGCUGUACAU | 418 | AUGUACAGCUGGUUGGACC | 828 | GGTCCAACCAGCTGTACAT | 2004 |
| 444 | 462 | CCAACCAGCUGUACAUUUG | 1768 | CAAAUGUACAGCUGGUUGG | 1879 | CCAACCAGCTGTACATTTG | 2005 |
| 448 | 466 | CCAGCUGUACAUUUGGAAA | 1769 | UUUCCAAAUGUACAGCUGG | 1880 | CCAGCTGTACATTTGGAAA | 2006 |
| 451 | 469 | GCUGUACAUUUGGAAAAAU | 428 | AUUUUUCCAAAUGUACAGC | 838 | GCTGTACATTTGGAAAAAT | 2007 |
| 454 | 472 | GUACAUUUGGAAAAAUAAA | 1770 | UUUAUUUUUCCAAAUGUAC | 1881 | GTACATTTGGAAAAATAAA | 2008 |
| 456 | 474 | ACAUUUGGAAAAAUAAAAC | 1771 | GUUUUAUUUUUCCAAAUGU | 1882 | ACATTTGGAAAAATAAAAC | 2009 |
| 462 | 480 | GGAAAAAUAAAACUUUAUU | 1772 | AAUAAAGUUUUAUUUUUCC | 1883 | GGAAAAATAAAACTTTATT | 2010 |
| 465 | 483 | AAAAUAAAACUUUAUUAAA | 1773 | UUUAAUAAAGUUUUAUUUU | 1884 | AAAATAAAACTTTATTAAA | 2011 |

TABLE 5
RPS25 Modified duplex Sequences

| Start | End | | | | | | |
|---|---|---|---|---|---|---|---|
| Site in | Site in | | SEQ | Sense | SEQ | Antisense | SEQ |
| NM_ | NM_ | Target Sequence | ID | Oligo Sequence | ID | Oligo Sequence | ID |
| 001028.3 | 00128.3 | 5’ to 3’ | NO: | 5’ to 3’ | NO: | 5’ to 3’ | NO: |
| 1 | 19 | CTTTTTGTCCGACATCTTG | 1885 | CUUUUUGUCCGACAUCUUGdTdT | 2012 | CAAGAUGUCGGACAAAAAGdTdT | 2123 |
| 3 | 21 | TTTTGTCCGACATCTTGAC | 1886 | UUUUGUCCGACAUCUUGACdTdT | 2013 | GUCAAGAUGUCGGACAAAAdTdT | 2124 |
| 6 | 24 | TGTCCGACATCTTGACGAG | 1887 | UGUCCGACAUCUUGACGAGdTdT | 2014 | CUCGUCAAGAUGUCGGACAdTdT | 2125 |
| 9 | 27 | CCGACATCTTGACGAGGCT | 1888 | CCGACAUCUUGACGAGGCUdTdT | 851 | AGCCUCGUCAAGAUGUCGGdTdT | 1261 |
| 12 | 30 | ACATCTTGACGAGGCTGCG | 1889 | ACAUCUUGACGAGGCUGCGdTdT | 2015 | CGCAGCCUCGUCAAGAUGUdTdT | 2126 |
| 16 | 34 | CTTGACGAGGCTGCGGTGT | 1890 | CUUGACGAGGCUGCGGUGUdTdT | 858 | ACACCGCAGCCUCGUCAAGdTdT | 1268 |
| 22 | 40 | GAGGCTGCGGTGTCTGCTG | 1891 | GAGGCUGCGGUGUCUGCUGdTdT | 2016 | CAGCAGACACCGCAGCCUCdTdT | 2127 |
| 25 | 43 | GCTGCGGTGTCTGCTGCTA | 1892 | GCUGCGGUGUCUGCUGCUAdTdT | 2017 | UAGCAGCAGACACCGCAGCdTdT | 2128 |
| 29 | 47 | CGGTGTCTGCTGCTATTCT | 1893 | CGGUGUCUGCUGCUAUUCUdTdT | 871 | AGAAUAGCAGCAGACACCGdTdT | 1281 |
| 31 | 49 | GTGTCTGCTGCTATTCTCC | 1894 | GUGUCUGCUGCUAUUCUCCdTdT | 2018 | GGAGAAUAGCAGCAGACACdTdT | 2129 |
| 33 | 51 | GTCTGCTGCTATTCTCCGA | 1895 | GUCUGCUGCUAUUCUCCGAdTdT | 2019 | UCGGAGAAUAGCAGCAGACdTdT | 2130 |
| 37 | 55 | GCTGCTATTCTCCGAGCTT | 1896 | GCUGCUAUUCUCCGAGCUUdTdT | 879 | AAGCUCGGAGAAUAGCAGCdTdT | 1289 |
| 42 | 60 | TATTCTCCGAGCTTCGCAA | 1897 | UAUUCUCCGAGCUUCGCAAdTdT | 2020 | UUGCGAAGCUCGGAGAAUAdTdT | 2131 |
| 45 | 63 | TCTCCGAGCTTCGCAATGC | 1898 | UCUCCGAGCUUCGCAAUGCdTdT | 2021 | GCAUUGCGAAGCUCGGAGAdTdT | 2132 |
| 48 | 66 | CCGAGCTTCGCAATGCCGC | 1899 | CCGAGCUUCGCAAUGCCGCdTdT | 2022 | GCGGCAUUGCGAAGCUCGGdTdT | 2133 |
| 53 | 71 | CTTCGCAATGCCGCCTAAG | 1900 | CUUCGCAAUGCCGCCUAAGdTdT | 2023 | CUUAGGCGGCAUUGCGAAGdTdT | 2134 |
| 54 | 72 | TTCGCAATGCCGCCTAAGG | 1901 | UUCGCAAUGCCGCCUAAGGdTdT | 2024 | CCUUAGGCGGCAUUGCGAAdTdT | 2135 |
| 60 | 78 | ATGCCGCCTAAGGACGACA | 1902 | AUGCCGCCUAAGGACGACAdTdT | 2025 | UGUCGUCCUUAGGCGGCAUdTdT | 2136 |
| 62 | 80 | GCCGCCTAAGGACGACAAG | 1903 | GCCGCCUAAGGACGACAAGdTdT | 2026 | CUUGUCGUCCUUAGGCGGCdTdT | 2137 |
| 64 | 82 | CGCCTAAGGACGACAAGAA | 1904 | CGCCUAAGGACGACAAGAAdTdT | 2027 | UUCUUGUCGUCCUUAGGCGdTdT | 2138 |
| 70 | 88 | AGGACGACAAGAAGAAGAA | 2520 | AGGACGACAAGAAGAAGAAdTdT | 2028 | UUCUUCUUCUUGUCGUCCUdTdT | 2139 |
| 71 | 89 | GGACGACAAGAAGAAGAAG | 2521 | GGACGACAAGAAGAAGAAGdTdT | 2029 | CUUCUUCUUCUUGUCGUCCdTdT | 2140 |
| 76 | 94 | ACAAGAAGAAGAAGGACGC | 2522 | ACAAGAAGAAGAAGGACGCdTdT | 2030 | GCGUCCUUCUUCUUCUUGUdTdT | 2141 |
| 79 | 97 | AGAAGAAGAAGGACGCTGG | 1905 | AGAAGAAGAAGGACGCUGGdTdT | 2031 | CCAGCGUCCUUCUUCUUCUdTdT | 2142 |
| 83 | 101 | GAAGAAGGACGCTGGAAAG | 1906 | GAAGAAGGACGCUGGAAAGdTdT | 2032 | CUUUCCAGCGUCCUUCUUCdTdT | 2143 |
| 85 | 103 | AGAAGGACGCTGGAAAGTC | 1907 | AGAAGGACGCUGGAAAGUCdTdT | 2033 | GACUUUCCAGCGUCCUUCUdTdT | 2144 |
| 91 | 109 | ACGCTGGAAAGTCGGCCAA | 1908 | ACGCUGGAAAGUCGGCCAAdTdT | 2034 | UUGGCCGACUUUCCAGCGUdTdT | 2145 |
| 94 | 112 | CTGGAAAGTCGGCCAAGAA | 1909 | CUGGAAAGUCGGCCAAGAAdTdT | 2035 | UUCUUGGCCGACUUUCCAGdTdT | 2146 |
| 96 | 114 | GGAAAGTCGGCCAAGAAAG | 1910 | GGAAAGUCGGCCAAGAAAGdTdT | 2036 | CUUUCUUGGCCGACUUUCCdTdT | 2147 |
| 101 | 119 | GTCGGCCAAGAAAGACAAA | 1911 | GUCGGCCAAGAAAGACAAAdTdT | 2037 | UUUGUCUUUCUUGGCCGACdTdT | 2148 |
| 103 | 121 | CGGCCAAGAAAGACAAAGA | 2523 | CGGCCAAGAAAGACAAAGAdTdT | 2038 | UCUUUGUCUUUCUUGGCCGdTdT | 2149 |
| 107 | 125 | CAAGAAAGACAAAGACCCA | 2524 | CAAGAAAGACAAAGACCCAdTdT | 2039 | UGGGUCUUUGUCUUUCUUGdTdT | 2150 |
| 109 | 127 | AGAAAGACAAAGACCCAGT | 1912 | AGAAAGACAAAGACCCAGUdTdT | 950 | ACUGGGUCUUUGUCUUUCUdTdT | 1360 |
| 115 | 133 | ACAAAGACCCAGTGAACAA | 1913 | ACAAAGACCCAGUGAACAAdTdT | 2040 | UUGUUCACUGGGUCUUUGUdTdT | 2151 |
| 116 | 134 | CAAAGACCCAGTGAACAAA | 1914 | CAAAGACCCAGUGAACAAAdTdT | 2041 | UUUGUUCACUGGGUCUUUGdTdT | 2152 |
| 120 | 138 | GACCCAGTGAACAAATCCG | 1915 | GACCCAGUGAACAAAUCCGdTdT | 2042 | CGGAUUUGUUCACUGGGUCdTdT | 2153 |
| 125 | 143 | AGTGAACAAATCCGGGGGC | 1916 | AGUGAACAAAUCCGGGGGCdTdT | 2043 | GCCCCCGGAUUUGUUCACUdTdT | 2154 |
| 127 | 145 | TGAACAAATCCGGGGGCAA | 1917 | UGAACAAAUCCGGGGGCAAdTdT | 2044 | UUGCCCCCGGAUUUGUUCAdTdT | 2155 |
| 130 | 148 | ACAAATCCGGGGGCAAGGC | 1918 | ACAAAUCCGGGGGCAAGGCdTdT | 2045 | GCCUUGCCCCCGGAUUUGUdTdT | 2156 |
| 136 | 154 | CCGGGGGCAAGGCCAAAAA | 2525 | CCGGGGGCAAGGCCAAAAAdTdT | 2046 | UUUUUGGCCUUGCCCCCGGdTdT | 2157 |
| 140 | 158 | GGGCAAGGCCAAAAAGAAG | 2526 | GGGCAAGGCCAAAAAGAAGdTdT | 2047 | CUUCUUUUUGGCCUUGCCCdTdT | 2158 |
| 142 | 160 | GCAAGGCCAAAAAGAAGAA | 2527 | GCAAGGCCAAAAAGAAGAAdTdT | 2048 | UUCUUCUUUUUGGCCUUGCdTdT | 2159 |
| 146 | 164 | GGCCAAAAAGAAGAAGTGG | 1919 | GGCCAAAAAGAAGAAGUGGdTdT | 2049 | CCACUUCUUCUUUUUGGCCdTdT | 2160 |
| 148 | 166 | CCAAAAAGAAGAAGTGGTC | 1920 | CCAAAAAGAAGAAGUGGUCdTdT | 2050 | GACCACUUCUUCUUUUUGGdTdT | 2161 |
| 151 | 169 | AAAAGAAGAAGTGGTCCAA | 1921 | AAAAGAAGAAGUGGUCCAAdTdT | 2051 | UUGGACCACUUCUUCUUUUdTdT | 2162 |
| 154 | 172 | AGAAGAAGTGGTCCAAAGG | 1922 | AGAAGAAGUGGUCCAAAGGdTdT | 2052 | CCUUUGGACCACUUCUUCUdTdT | 2163 |
| 160 | 178 | AGTGGTCCAAAGGCAAAGT | 1923 | AGUGGUCCAAAGGCAAAGUdTdT | 982 | ACUUUGCCUUUGGACCACUdTdT | 1392 |
| 163 | 181 | GGTCCAAAGGCAAAGTTCG | 1924 | GGUCCAAAGGCAAAGUUCGdTdT | 2053 | CGAACUUUGCCUUUGGACCdTdT | 2164 |
| 165 | 183 | TCCAAAGGCAAAGTTCGGG | 1925 | UCCAAAGGCAAAGUUCGGGdTdT | 2054 | CCCGAACUUUGCCUUUGGAdTdT | 2165 |
| 169 | 187 | AAGGCAAAGTTCGGGACAA | 1926 | AAGGCAAAGUUCGGGACAAdTdT | 2055 | UUGUCCCGAACUUUGCCUUdTdT | 2166 |
| 173 | 191 | CAAAGTTCGGGACAAGCTC | 1927 | CAAAGUUCGGGACAAGCUCdTdT | 2056 | GAGCUUGUCCCGAACUUUGdTdT | 2167 |
| 178 | 196 | TTCGGGACAAGCTCAATAA | 1928 | UUCGGGACAAGCUCAAUAAdTdT | 2057 | UUAUUGAGCUUGUCCCGAAdTdT | 2168 |
| 181 | 199 | GGGACAAGCTCAATAACTT | 1929 | GGGACAAGCUCAAUAACUUdTdT | 1003 | AAGUUAUUGAGCUUGUCCCdTdT | 1413 |
| 182 | 200 | GGACAAGCTCAATAACTTA | 1930 | GGACAAGCUCAAUAACUUAdTdT | 2058 | UAAGUUAUUGAGCUUGUCCdTdT | 2169 |
| 188 | 206 | GCTCAATAACTTAGTCTTG | 1931 | GCUCAAUAACUUAGUCUUGdTdT | 2059 | CAAGACUAAGUUAUUGAGCdTdT | 2170 |
| 189 | 207 | CTCAATAACTTAGTCTTGT | 1932 | CUCAAUAACUUAGUCUUGUdTdT | 1011 | ACAAGACUAAGUUAUUGAGdTdT | 1421 |
| 192 | 210 | AATAACTTAGTCTTGTTTG | 1933 | AAUAACUUAGUCUUGUUUGdTdT | 2060 | CAAACAAGACUAAGUUAUUdTdT | 2171 |
| 197 | 215 | CTTAGTCTTGTTTGACAAA | 1934 | CUUAGUCUUGUUUGACAAAdTdT | 2061 | UUUGUCAAACAAGACUAAGdTdT | 2172 |
| 200 | 218 | AGTCTTGTTTGACAAAGCT | 1935 | AGUCUUGUUUGACAAAGCUdTdT | 1022 | AGCUUUGUCAAACAAGACUdTdT | 1432 |
| 203 | 221 | CTTGTTTGACAAAGCTACC | 1936 | CUUGUUUGACAAAGCUACCdTdT | 2062 | GGUAGCUUUGUCAAACAAGdTdT | 2173 |
| 206 | 224 | GTTTGACAAAGCTACCTAT | 1937 | GUUUGACAAAGCUACCUAUdTdT | 1028 | AUAGGUAGCUUUGUCAAACdTdT | 1438 |
| 212 | 230 | CAAAGCTACCTATGATAAA | 1938 | CAAAGCUACCUAUGAUAAAdTdT | 2063 | UUUAUCAUAGGUAGCUUUGdTdT | 2174 |
| 216 | 234 | GCTACCTATGATAAACTCT | 1939 | GCUACCUAUGAUAAACUCUdTdT | 1038 | AGAGUUUAUCAUAGGUAGCdTdT | 1448 |
| 217 | 235 | CTACCTATGATAAACTCTG | 1940 | CUACCUAUGAUAAACUCUGdTdT | 2064 | CAGAGUUUAUCAUAGGUAGdTdT | 2175 |
| 220 | 238 | CCTATGATAAACTCTGTAA | 1941 | CCUAUGAUAAACUCUGUAAdTdT | 2065 | UUACAGAGUUUAUCAUAGGdTdT | 2176 |
| 224 | 242 | TGATAAACTCTGTAAGGAA | 1942 | UGAUAAACUCUGUAAGGAAdTdT | 2066 | UUCCUUACAGAGUUUAUCAdTdT | 2177 |
| 229 | 247 | AACTCTGTAAGGAAGTTCC | 1943 | AACUCUGUAAGGAAGUUCCdTdT | 2067 | GGAACUUCCUUACAGAGUUdTdT | 2178 |
| 231 | 249 | CTCTGTAAGGAAGTTCCCA | 1944 | CUCUGUAAGGAAGUUCCCAdTdT | 2068 | UGGGAACUUCCUUACAGAGdTdT | 2179 |
| 236 | 254 | TAAGGAAGTTCCCAACTAT | 1945 | UAAGGAAGUUCCCAACUAUdTdT | 1058 | AUAGUUGGGAACUUCCUUAdTdT | 1468 |
| 239 | 257 | GGAAGTTCCCAACTATAAA | 1946 | GGAAGUUCCCAACUAUAAAdTdT | 2069 | UUUAUAGUUGGGAACUUCCdTdT | 2180 |
| 243 | 261 | GTTCCCAACTATAAACTTA | 1947 | GUUCCCAACUAUAAACUUAdTdT | 2070 | UAAGUUUAUAGUUGGGAACdTdT | 2181 |
| 245 | 263 | TCCCAACTATAAACTTATA | 1948 | UCCCAACUAUAAACUUAUAdTdT | 2071 | UAUAAGUUUAUAGUUGGGAdTdT | 2182 |
| 248 | 266 | CAACTATAAACTTATAACC | 1949 | CAACUAUAAACUUAUAACCdTdT | 2072 | GGUUAUAAGUUUAUAGUUGdTdT | 2183 |
| 254 | 272 | TAAACTTATAACCCCAGCT | 1950 | UAAACUUAUAACCCCAGCUdTdT | 2073 | AGCUGGGGUUAUAAGUUUAdTdT | 2184 |
| 255 | 273 | AAACTTATAACCCCAGCTG | 1951 | AAACUUAUAACCCCAGCUGdTdT | 2074 | CAGCUGGGGUUAUAAGUUUdTdT | 2185 |
| 258 | 276 | CTTATAACCCCAGCTGTGG | 1952 | CUUAUAACCCCAGCUGUGGdTdT | 2075 | CCACAGCUGGGGUUAUAAGdTdT | 2186 |
| 264 | 282 | ACCCCAGCTGTGGTCTCTG | 1953 | ACCCCAGCUGUGGUCUCUGdTdT | 2076 | CAGAGACCACAGCUGGGGUdTdT | 2187 |
| 267 | 285 | CCAGCTGTGGTCTCTGAGA | 1954 | CCAGCUGUGGUCUCUGAGAdTdT | 2077 | UCUCAGAGACCACAGCUGGdTdT | 2188 |
| 271 | 289 | CTGTGGTCTCTGAGAGACT | 1955 | CUGUGGUCUCUGAGAGACUdTdT | 1077 | AGUCUCUCAGAGACCACAGdTdT | 1487 |
| 274 | 292 | TGGTCTCTGAGAGACTGAA | 1956 | UGGUCUCUGAGAGACUGAAdTdT | 2078 | UUCAGUCUCUCAGAGACCAdTdT | 2189 |
| 278 | 296 | CTCTGAGAGACTGAAGATT | 1957 | CUCUGAGAGACUGAAGAUUdTdT | 1084 | AAUCUUCAGUCUCUCAGAGdTdT | 1494 |
| 279 | 297 | TCTGAGAGACTGAAGATTC | 1958 | UCUGAGAGACUGAAGAUUCdTdT | 2079 | GAAUCUUCAGUCUCUCAGAdTdT | 2190 |
| 282 | 300 | GAGAGACTGAAGATTCGAG | 1959 | GAGAGACUGAAGAUUCGAGdTdT | 2080 | CUCGAAUCUUCAGUCUCUCdTdT | 2191 |
| 287 | 305 | ACTGAAGATTCGAGGCTCC | 1960 | ACUGAAGAUUCGAGGCUCCdTdT | 2081 | GGAGCCUCGAAUCUUCAGUdTdT | 2192 |
| 289 | 307 | TGAAGATTCGAGGCTCCCT | 1961 | UGAAGAUUCGAGGCUCCCUdTdT | 1095 | AGGGAGCCUCGAAUCUUCAdTdT | 1505 |
| 293 | 311 | GATTCGAGGCTCCCTGGCC | 1962 | GAUUCGAGGCUCCCUGGCCdTdT | 2082 | GGCCAGGGAGCCUCGAAUCdTdT | 2193 |
| 298 | 316 | GAGGCTCCCTGGCCAGGGC | 1963 | GAGGCUCCCUGGCCAGGGCdTdT | 2083 | GCCCUGGCCAGGGAGCCUCdTdT | 2194 |
| 302 | 320 | CTCCCTGGCCAGGGCAGCC | 1964 | CUCCCUGGCCAGGGCAGCCdTdT | 2084 | GGCUGCCCUGGCCAGGGAGdTdT | 2195 |
| 306 | 324 | CTGGCCAGGGCAGCCCTTC | 1965 | CUGGCCAGGGCAGCCCUUCdTdT | 2085 | GAAGGGCUGCCCUGGCCAGdTdT | 2196 |
| 308 | 326 | GGCCAGGGCAGCCCTTCAG | 1966 | GGCCAGGGCAGCCCUUCAGdTdT | 2086 | CUGAAGGGCUGCCCUGGCCdTdT | 2197 |
| 313 | 331 | GGGCAGCCCTTCAGGAGCT | 1967 | GGGCAGCCCUUCAGGAGCUdTdT | 1110 | AGCUCCUGAAGGGCUGCCCdTdT | 1520 |
| 316 | 334 | CAGCCCTTCAGGAGCTCCT | 1968 | CAGCCCUUCAGGAGCUCCUdTdT | 1113 | AGGAGCUCCUGAAGGGCUGdTdT | 1523 |
| 318 | 336 | GCCCTTCAGGAGCTCCTTA | 1969 | GCCCUUCAGGAGCUCCUUAdTdT | 2087 | UAAGGAGCUCCUGAAGGGCdTdT | 2198 |
| 323 | 341 | TCAGGAGCTCCTTAGTAAA | 1970 | UCAGGAGCUCCUUAGUAAAdTdT | 2088 | UUUACUAAGGAGCUCCUGAdTdT | 2199 |
| 326 | 344 | GGAGCTCCTTAGTAAAGGA | 1971 | GGAGCUCCUUAGUAAAGGAdTdT | 2089 | UCCUUUACUAAGGAGCUCCdTdT | 2200 |
| 330 | 348 | CTCCTTAGTAAAGGACTTA | 1972 | CUCCUUAGUAAAGGACUUAdTdT | 2090 | UAAGUCCUUUACUAAGGAGdTdT | 2201 |
| 333 | 351 | CTTAGTAAAGGACTTATCA | 1973 | CUUAGUAAAGGACUUAUCAdTdT | 2091 | UGAUAAGUCCUUUACUAAGdTdT | 2202 |
| 335 | 353 | TAGTAAAGGACTTATCAAA | 1974 | UAGUAAAGGACUUAUCAAAdTdT | 2092 | UUUGAUAAGUCCUUUACUAdTdT | 2203 |
| 340 | 358 | AAGGACTTATCAAACTGGT | 1975 | AAGGACUUAUCAAACUGGUdTdT | 1137 | ACCAGUUUGAUAAGUCCUUdTdT | 1547 |
| 343 | 361 | GACTTATCAAACTGGTTTC | 1976 | GACUUAUCAAACUGGUUUCdTdT | 2093 | GAAACCAGUUUGAUAAGUCdTdT | 2204 |
| 345 | 363 | CTTATCAAACTGGTTTCAA | 1977 | CUUAUCAAACUGGUUUCAAdTdT | 2094 | UUGAAACCAGUUUGAUAAGdTdT | 2205 |
| 348 | 366 | ATCAAACTGGTTTCAAAGC | 1978 | AUCAAACUGGUUUCAAAGCdTdT | 2095 | GCUUUGAAACCAGUUUGAUdTdT | 2206 |
| 353 | 371 | ACTGGTTTCAAAGCACAGA | 1979 | ACUGGUUUCAAAGCACAGAdTdT | 2096 | UCUGUGCUUUGAAACCAGUdTdT | 2207 |
| 358 | 376 | TTTCAAAGCACAGAGCTCA | 1980 | UUUCAAAGCACAGAGCUCAdTdT | 2097 | UGAGCUCUGUGCUUUGAAAdTdT | 2208 |
| 359 | 377 | TTCAAAGCACAGAGCTCAA | 1981 | UUCAAAGCACAGAGCUCAAdTdT | 2098 | UUGAGCUCUGUGCUUUGAAdTdT | 2209 |
| 365 | 383 | GCACAGAGCTCAAGTAATT | 1982 | GCACAGAGCUCAAGUAAUUdTdT | 1162 | AAUUACUUGAGCUCUGUGCdTdT | 1572 |
| 368 | 386 | CAGAGCTCAAGTAATTTAC | 1983 | CAGAGCUCAAGUAAUUUACdTdT | 2099 | GUAAAUUACUUGAGCUCUGdTdT | 2210 |
| 369 | 387 | AGAGCTCAAGTAATTTACA | 1984 | AGAGCUCAAGUAAUUUACAdTdT | 2100 | UGUAAAUUACUUGAGCUCUdTdT | 2211 |
| 373 | 391 | CTCAAGTAATTTACACCAG | 1985 | CUCAAGUAAUUUACACCAGdTdT | 2101 | CUGGUGUAAAUUACUUGAGdTdT | 2212 |
| 378 | 396 | GTAATTTACACCAGAAATA | 1986 | GUAAUUUACACCAGAAAUAdTdT | 2102 | UAUUUCUGGUGUAAAUUACdTdT | 2213 |
| 379 | 397 | TAATTTACACCAGAAATAC | 1987 | UAAUUUACACCAGAAAUACdTdT | 2103 | GUAUUUCUGGUGUAAAUUAdTdT | 2214 |
| 384 | 402 | TACACCAGAAATACCAAGG | 1988 | UACACCAGAAAUACCAAGGdTdT | 2104 | CCUUGGUAUUUCUGGUGUAdTdT | 2215 |
| 387 | 405 | ACCAGAAATACCAAGGGTG | 1989 | ACCAGAAAUACCAAGGGUGdTdT | 2105 | CACCCUUGGUAUUUCUGGUdTdT | 2216 |
| 390 | 408 | AGAAATACCAAGGGTGGAG | 1990 | AGAAAUACCAAGGGUGGAGdTdT | 2106 | CUCCACCCUUGGUAUUUCUdTdT | 2217 |
| 393 | 411 | AATACCAAGGGTGGAGATG | 1991 | AAUACCAAGGGUGGAGAUGdTdT | 2107 | CAUCUCCACCCUUGGUAUUdTdT | 2218 |
| 399 | 417 | AAGGGTGGAGATGCTCCAG | 1992 | AAGGGUGGAGAUGCUCCAGdTdT | 2108 | CUGGAGCAUCUCCACCCUUdTdT | 2219 |
| 402 | 420 | GGTGGAGATGCTCCAGCTG | 1993 | GGUGGAGAUGCUCCAGCUGdTdT | 2109 | CAGCUGGAGCAUCUCCACCdTdT | 2220 |
| 404 | 422 | TGGAGATGCTCCAGCTGCT | 1994 | UGGAGAUGCUCCAGCUGCUdTdT | 1201 | AGCAGCUGGAGCAUCUCCAdTdT | 1611 |
| 410 | 428 | TGCTCCAGCTGCTGGTGAA | 1995 | UGCUCCAGCUGCUGGUGAAdTdT | 2110 | UUCACCAGCAGCUGGAGCAdTdT | 2221 |
| 411 | 429 | GCTCCAGCTGCTGGTGAAG | 1996 | GCUCCAGCUGCUGGUGAAGdTdT | 2111 | CUUCACCAGCAGCUGGAGCdTdT | 2222 |
| 417 | 435 | GCTGCTGGTGAAGATGCAT | 1997 | GCUGCUGGUGAAGAUGCAUdTdT | 1214 | AUGCAUCUUCACCAGCAGCdTdT | 1624 |
| 419 | 437 | TGCTGGTGAAGATGCATGA | 1998 | UGCUGGUGAAGAUGCAUGAdTdT | 2112 | UCAUGCAUCUUCACCAGCAdTdT | 2223 |
| 423 | 441 | GGTGAAGATGCATGAATAG | 1999 | GGUGAAGAUGCAUGAAUAGdTdT | 2113 | CUAUUCAUGCAUCUUCACCdTdT | 2224 |
| 426 | 444 | GAAGATGCATGAATAGGTC | 2000 | GAAGAUGCAUGAAUAGGUCdTdT | 2114 | GACCUAUUCAUGCAUCUUCdTdT | 2225 |
| 430 | 448 | ATGCATGAATAGGTCCAAC | 2001 | AUGCAUGAAUAGGUCCAACdTdT | 2115 | GUUGGACCUAUUCAUGCAUdTdT | 2226 |
| 432 | 450 | GCATGAATAGGTCCAACCA | 2002 | GCAUGAAUAGGUCCAACCAdTdT | 2116 | UGGUUGGACCUAUUCAUGCdTdT | 2227 |
| 435 | 453 | TGAATAGGTCCAACCAGCT | 2003 | UGAAUAGGUCCAACCAGCUdTdT | 1232 | AGCUGGUUGGACCUAUUCAdTdT | 1642 |
| 441 | 459 | GGTCCAACCAGCTGTACAT | 2004 | GGUCCAACCAGCUGUACAUdTdT | 1238 | AUGUACAGCUGGUUGGACCdTdT | 1648 |
| 444 | 462 | CCAACCAGCTGTACATTTG | 2005 | CCAACCAGCUGUACAUUUGdTdT | 2117 | CAAAUGUACAGCUGGUUGGdTdT | 2228 |
| 448 | 466 | CCAGCTGTACATTTGGAAA | 2006 | CCAGCUGUACAUUUGGAAAdTdT | 2118 | UUUCCAAAUGUACAGCUGGdTdT | 2229 |
| 451 | 469 | GCTGTACATTTGGAAAAAT | 2007 | GCUGUACAUUUGGAAAAAUdTdT | 1248 | AUUUUUCCAAAUGUACAGCdTdT | 1658 |
| 454 | 472 | GTACATTTGGAAAAATAAA | 2008 | GUACAUUUGGAAAAAUAAAdTdT | 2119 | UUUAUUUUUCCAAAUGUACdTdT | 2230 |
| 456 | 474 | ACATTTGGAAAAATAAAAC | 2009 | ACAUUUGGAAAAAUAAAACdTdT | 2120 | GUUUUAUUUUUCCAAAUGUdTdT | 2231 |
| 462 | 480 | GGAAAAATAAAACTTTATT | 2010 | GGAAAAAUAAAACUUUAUUdTdT | 2121 | AAUAAAGUUUUAUUUUUCCdTdT | 2232 |
| 465 | 483 | AAAATAAAACTTTATTAAA | 2011 | AAAAUAAAACUUUAUUAAAdTdT | 2122 | UUUAAUAAAGUUUUAUUUUdTdT | 2233 |

TABLE 6
RPS25 Unmodified duplex Sequences

| Start | End | | | | | | |
|---|---|---|---|---|---|---|---|
| Site in | Site in | Sense | SEQ | Antisense | SEQ | | SEQ |
| NM_ | NM_ | Oligo Sequence | ID | Oligo Sequence | ID | Target Sequence | ID |
| 001028.3 | 00128.3 | 5’ to 3’ | NO: | 5’ to 3’ | NO: | 5’ to 3’ | NO: |
| 245 | 263 | UCCCAACUAUAAACUUAUA | 1722 | UAUAAGUUUAUAGUUGGGA | 1833 | TCCCAACTATAAACTTATA | 1948 |
| 246 | 264 | CCCAACUAUAAACUUAUAA | 2234 | UUAUAAGUUUAUAGUUGGG | 2287 | CCCAACTATAAACTTATAA | 2340 |
| 188 | 206 | GCUCAAUAACUUAGUCUUG | 1710 | CAAGACUAAGUUAUUGAGC | 1821 | GCTCAATAACTTAGTCTTG | 1931 |
| 343 | 361 | GACUUAUCAAACUGGUUUC | 1744 | GAAACCAGUUUGAUAAGUC | 1855 | GACTTATCAAACTGGTTTC | 1976 |
| 244 | 262 | UUCCCAACUAUAAACUUAU | 246 | AUAAGUUUAUAGUUGGGAA | 656 | TTCCCAACTATAAACTTAT | 2341 |
| 189 | 207 | CUCAAUAACUUAGUCUUGU | 191 | ACAAGACUAAGUUAUUGAG | 601 | CTCAATAACTTAGTCTTGT | 1932 |
| 247 | 265 | CCAACUAUAAACUUAUAAC | 2235 | GUUAUAAGUUUAUAGUUGG | 2288 | CCAACTATAAACTTATAAC | 2342 |
| 182 | 200 | GGACAAGCUCAAUAACUUA | 1709 | UAAGUUAUUGAGCUUGUCC | 1820 | GGACAAGCTCAATAACTTA | 1930 |
| 181 | 199 | GGGACAAGCUCAAUAACUU | 183 | AAGUUAUUGAGCUUGUCCC | 593 | GGGACAAGCTCAATAACTT | 1929 |
| 248 | 266 | CAACUAUAAACUUAUAACC | 1723 | GGUUAUAAGUUUAUAGUUG | 1834 | CAACTATAAACTTATAACC | 1949 |
| 243 | 261 | GUUCCCAACUAUAAACUUA | 1721 | UAAGUUUAUAGUUGGGAAC | 1832 | GTTCCCAACTATAAACTTA | 1947 |
| 187 | 205 | AGCUCAAUAACUUAGUCUU | 189 | AAGACUAAGUUAUUGAGCU | 599 | AGCTCAATAACTTAGTCTT | 2343 |
| 368 | 386 | CAGAGCUCAAGUAAUUUAC | 1750 | GUAAAUUACUUGAGCUCUG | 1861 | CAGAGCTCAAGTAATTTAC | 1983 |
| 344 | 362 | ACUUAUCAAACUGGUUUCA | 2236 | UGAAACCAGUUUGAUAAGU | 2289 | ACTTATCAAACTGGTTTCA | 2344 |
| 330 | 348 | CUCCUUAGUAAAGGACUUA | 1741 | UAAGUCCUUUACUAAGGAG | 1852 | CTCCTTAGTAAAGGACTTA | 1972 |
| 342 | 360 | GGACUUAUCAAACUGGUUU | 319 | AAACCAGUUUGAUAAGUCC | 729 | GGACTTATCAAACTGGTTT | 2345 |
| 345 | 363 | CUUAUCAAACUGGUUUCAA | 1745 | UUGAAACCAGUUUGAUAAG | 1856 | CTTATCAAACTGGTTTCAA | 1977 |
| 369 | 387 | AGAGCUCAAGUAAUUUACA | 1751 | UGUAAAUUACUUGAGCUCU | 1862 | AGAGCTCAAGTAATTTACA | 1984 |
| 454 | 472 | GUACAUUUGGAAAAAUAAA | 1770 | UUUAUUUUUCCAAAUGUAC | 1881 | GTACATTTGGAAAAATAAA | 2008 |
| 378 | 396 | GUAAUUUACACCAGAAAUA | 1753 | UAUUUCUGGUGUAAAUUAC | 1864 | GTAATTTACACCAGAAATA | 1986 |
| 242 | 260 | AGUUCCCAACUAUAAACUU | 244 | AAGUUUAUAGUUGGGAACU | 654 | AGTTCCCAACTATAAACTT | 2346 |
| 346 | 364 | UUAUCAAACUGGUUUCAAA | 2237 | UUUGAAACCAGUUUGAUAA | 2290 | TTATCAAACTGGTTTCAAA | 2347 |
| 347 | 365 | UAUCAAACUGGUUUCAAAG | 2238 | CUUUGAAACCAGUUUGAUA | 2291 | TATCAAACTGGTTTCAAAG | 2348 |
| 451 | 469 | GCUGUACAUUUGGAAAAAU | 428 | AUUUUUCCAAAUGUACAGC | 838 | GCTGTACATTTGGAAAAAT | 2007 |
| 333 | 351 | CUUAGUAAAGGACUUAUCA | 1742 | UGAUAAGUCCUUUACUAAG | 1853 | CTTAGTAAAGGACTTATCA | 1973 |
| 377 | 395 | AGUAAUUUACACCAGAAAU | 354 | AUUUCUGGUGUAAAUUACU | 764 | AGTAATTTACACCAGAAAT | 2349 |
| 452 | 470 | CUGUACAUUUGGAAAAAUA | 2239 | UAUUUUUCCAAAUGUACAG | 2292 | CTGTACATTTGGAAAAATA | 2350 |
| 183 | 201 | GACAAGCUCAAUAACUUAG | 2240 | CUAAGUUAUUGAGCUUGUC | 2293 | GACAAGCTCAATAACTTAG | 2351 |
| 239 | 257 | GGAAGUUCCCAACUAUAAA | 1720 | UUUAUAGUUGGGAACUUCC | 1831 | GGAAGTTCCCAACTATAAA | 1946 |
| 372 | 390 | GCUCAAGUAAUUUACACCA | 2241 | UGGUGUAAAUUACUUGAGC | 2294 | GCTCAAGTAATTTACACCA | 2352 |
| 217 | 235 | CUACCUAUGAUAAACUCUG | 1715 | CAGAGUUUAUCAUAGGUAG | 1826 | CTACCTATGATAAACTCTG | 1940 |
| 448 | 466 | CCAGCUGUACAUUUGGAAA | 1769 | UUUCCAAAUGUACAGCUGG | 1880 | CCAGCTGTACATTTGGAAA | 2006 |
| 329 | 347 | GCUCCUUAGUAAAGGACUU | 306 | AAGUCCUUUACUAAGGAGC | 716 | GCTCCTTAGTAAAGGACTT | 2353 |
| 331 | 349 | UCCUUAGUAAAGGACUUAU | 308 | AUAAGUCCUUUACUAAGGA | 718 | TCCTTAGTAAAGGACTTAT | 2354 |
| 31 | 49 | GUGUCUGCUGCUAUUCUCC | 1669 | GGAGAAUAGCAGCAGACAC | 1780 | GTGTCTGCTGCTATTCTCC | 1894 |
| 179 | 197 | UCGGGACAAGCUCAAUAAC | 2242 | GUUAUUGAGCUUGUCCCGA | 2295 | TCGGGACAAGCTCAATAAC | 2355 |
| 6 | 24 | UGUCCGACAUCUUGACGAG | 1665 | CUCGUCAAGAUGUCGGACA | 1776 | TGTCCGACATCTTGACGAG | 1887 |
| 220 | 238 | CCUAUGAUAAACUCUGUAA | 1716 | UUACAGAGUUUAUCAUAGG | 1827 | CCTATGATAAACTCTGTAA | 1941 |
| 376 | 394 | AAGUAAUUUACACCAGAAA | 2243 | UUUCUGGUGUAAAUUACUU | 2296 | AAGTAATTTACACCAGAAA | 2356 |
| 453 | 471 | UGUACAUUUGGAAAAAUAA | 2244 | UUAUUUUUCCAAAUGUACA | 2297 | TGTACATTTGGAAAAATAA | 2357 |
| 332 | 350 | CCUUAGUAAAGGACUUAUC | 2245 | GAUAAGUCCUUUACUAAGG | 2298 | CCTTAGTAAAGGACTTATC | 2358 |
| 449 | 467 | CAGCUGUACAUUUGGAAAA | 2246 | UUUUCCAAAUGUACAGCUG | 2299 | CAGCTGTACATTTGGAAAA | 2359 |
| 278 | 296 | CUCUGAGAGACUGAAGAUU | 264 | AAUCUUCAGUCUCUCAGAG | 674 | CTCTGAGAGACTGAAGATT | 1957 |
| 279 | 297 | UCUGAGAGACUGAAGAUUC | 1730 | GAAUCUUCAGUCUCUCAGA | 1841 | TCTGAGAGACTGAAGATTC | 1958 |
| 276 | 294 | GUCUCUGAGAGACUGAAGA | 2247 | UCUUCAGUCUCUCAGAGAC | 2300 | GTCTCTGAGAGACTGAAGA | 2360 |
| 370 | 388 | GAGCUCAAGUAAUUUACAC | 2248 | GUGUAAAUUACUUGAGCUC | 2301 | GAGCTCAAGTAATTTACAC | 2361 |
| 229 | 247 | AACUCUGUAAGGAAGUUCC | 1718 | GGAACUUCCUUACAGAGUU | 1829 | AACTCTGTAAGGAAGTTCC | 1943 |
| 185 | 203 | CAAGCUCAAUAACUUAGUC | 2249 | GACUAAGUUAUUGAGCUUG | 2302 | CAAGCTCAATAACTTAGTC | 2362 |
| 221 | 239 | CUAUGAUAAACUCUGUAAG | 2250 | CUUACAGAGUUUAUCAUAG | 2303 | CTATGATAAACTCTGTAAG | 2363 |
| 33 | 51 | GUCUGCUGCUAUUCUCCGA | 1670 | UCGGAGAAUAGCAGCAGAC | 1781 | GTCTGCTGCTATTCTCCGA | 1895 |
| 163 | 181 | GGUCCAAAGGCAAAGUUCG | 1704 | CGAACUUUGCCUUUGGACC | 1815 | GGTCCAAAGGCAAAGTTCG | 1924 |
| 373 | 391 | CUCAAGUAAUUUACACCAG | 1752 | CUGGUGUAAAUUACUUGAG | 1863 | CTCAAGTAATTTACACCAG | 1985 |
| 375 | 393 | CAAGUAAUUUACACCAGAA | 2251 | UUCUGGUGUAAAUUACUUG | 2304 | CAAGTAATTTACACCAGAA | 2364 |
| 450 | 468 | AGCUGUACAUUUGGAAAAA | 2252 | UUUUUCCAAAUGUACAGCU | 2305 | AGCTGTACATTTGGAAAAA | 2365 |
| 180 | 198 | CGGGACAAGCUCAAUAACU | 182 | AGUUAUUGAGCUUGUCCCG | 592 | CGGGACAAGCTCAATAACT | 2366 |
| 190 | 208 | UCAAUAACUUAGUCUUGUU | 192 | AACAAGACUAAGUUAUUGA | 602 | TCAATAACTTAGTCTTGTT | 2367 |
| 203 | 221 | CUUGUUUGACAAAGCUACC | 1713 | GGUAGCUUUGUCAAACAAG | 1824 | CTTGTTTGACAAAGCTACC | 1936 |
| 462 | 480 | GGAAAAAUAAAACUUUAUU | 1772 | AAUAAAGUUUUAUUUUUCC | 1883 | GGAAAAATAAAACTTTATT | 2010 |
| 231 | 249 | CUCUGUAAGGAAGUUCCCA | 1719 | UGGGAACUUCCUUACAGAG | 1830 | CTCTGTAAGGAAGTTCCCA | 1944 |
| 30 | 48 | GGUGUCUGCUGCUAUUCUC | 2253 | GAGAAUAGCAGCAGACACC | 2306 | GGTGTCTGCTGCTATTCTC | 2368 |
| 200 | 218 | AGUCUUGUUUGACAAAGCU | 202 | AGCUUUGUCAAACAAGACU | 612 | AGTCTTGTTTGACAAAGCT | 1935 |
| 216 | 234 | GCUACCUAUGAUAAACUCU | 218 | AGAGUUUAUCAUAGGUAGC | 628 | GCTACCTATGATAAACTCT | 1939 |
| 341 | 359 | AGGACUUAUCAAACUGGUU | 318 | AACCAGUUUGAUAAGUCCU | 728 | AGGACTTATCAAACTGGTT | 2369 |
| 218 | 236 | UACCUAUGAUAAACUCUGU | 220 | ACAGAGUUUAUCAUAGGUA | 630 | TACCTATGATAAACTCTGT | 2370 |
| 461 | 479 | UGGAAAAAUAAAACUUUAU | 2254 | AUAAAGUUUUAUUUUUCCA | 2307 | TGGAAAAATAAAACTTTAT | 2371 |
| 162 | 180 | UGGUCCAAAGGCAAAGUUC | 2255 | GAACUUUGCCUUUGGACCA | 2308 | TGGTCCAAAGGCAAAGTTC | 2372 |
| 379 | 397 | UAAUUUACACCAGAAAUAC | 1754 | GUAUUUCUGGUGUAAAUUA | 1865 | TAATTTACACCAGAAATAC | 1987 |
| 280 | 298 | CUGAGAGACUGAAGAUUCG | 2256 | CGAAUCUUCAGUCUCUCAG | 2309 | CTGAGAGACTGAAGATTCG | 2373 |
| 191 | 209 | CAAUAACUUAGUCUUGUUU | 193 | AAACAAGACUAAGUUAUUG | 603 | CAATAACTTAGTCTTGTTT | 2374 |
| 212 | 230 | CAAAGCUACCUAUGAUAAA | 1714 | UUUAUCAUAGGUAGCUUUG | 1825 | CAAAGCTACCTATGATAAA | 1938 |
| 367 | 385 | ACAGAGCUCAAGUAAUUUA | 2257 | UAAAUUACUUGAGCUCUGU | 2310 | ACAGAGCTCAAGTAATTTA | 2375 |
| 230 | 248 | ACUCUGUAAGGAAGUUCCC | 2258 | GGGAACUUCCUUACAGAGU | 2311 | ACTCTGTAAGGAAGTTCCC | 2376 |
| 274 | 292 | UGGUCUCUGAGAGACUGAA | 1729 | UUCAGUCUCUCAGAGACCA | 1840 | TGGTCTCTGAGAGACTGAA | 1956 |
| 366 | 384 | CACAGAGCUCAAGUAAUUU | 343 | AAAUUACUUGAGCUCUGUG | 753 | CACAGAGCTCAAGTAATTT | 2377 |
| 371 | 389 | AGCUCAAGUAAUUUACACC | 2259 | GGUGUAAAUUACUUGAGCU | 2312 | AGCTCAAGTAATTTACACC | 2378 |
| 447 | 465 | ACCAGCUGUACAUUUGGAA | 2260 | UUCCAAAUGUACAGCUGGU | 2313 | ACCAGCTGTACATTTGGAA | 2379 |
| 223 | 241 | AUGAUAAACUCUGUAAGGA | 2261 | UCCUUACAGAGUUUAUCAU | 2314 | ATGATAAACTCTGTAAGGA | 2380 |
| 460 | 478 | UUGGAAAAAUAAAACUUUA | 2262 | UAAAGUUUUAUUUUUCCAA | 2315 | TTGGAAAAATAAAACTTTA | 2381 |
| 184 | 202 | ACAAGCUCAAUAACUUAGU | 186 | ACUAAGUUAUUGAGCUUGU | 596 | ACAAGCTCAATAACTTAGT | 2382 |
| 277 | 295 | UCUCUGAGAGACUGAAGAU | 263 | AUCUUCAGUCUCUCAGAGA | 673 | TCTCTGAGAGACTGAAGAT | 2383 |
| 232 | 250 | UCUGUAAGGAAGUUCCCAA | 2263 | UUGGGAACUUCCUUACAGA | 2316 | TCTGTAAGGAAGTTCCCAA | 2384 |
| 64 | 82 | CGCCUAAGGACGACAAGAA | 1678 | UUCUUGUCGUCCUUAGGCG | 1789 | CGCCTAAGGACGACAAGAA | 1904 |
| 282 | 300 | GAGAGACUGAAGAUUCGAG | 1731 | CUCGAAUCUUCAGUCUCUC | 1842 | GAGAGACTGAAGATTCGAG | 1959 |
| 224 | 242 | UGAUAAACUCUGUAAGGAA | 1717 | UUCCUUACAGAGUUUAUCA | 1828 | TGATAAACTCTGTAAGGAA | 1942 |
| 222 | 240 | UAUGAUAAACUCUGUAAGG | 2264 | CCUUACAGAGUUUAUCAUA | 2317 | TATGATAAACTCTGTAAGG | 2385 |
| 238 | 256 | AGGAAGUUCCCAACUAUAA | 2265 | UUAUAGUUGGGAACUUCCU | 2318 | AGGAAGTTCCCAACTATAA | 2386 |
| 254 | 272 | UAAACUUAUAACCCCAGCU | 1724 | AGCUGGGGUUAUAAGUUUA | 1835 | TAAACTTATAACCCCAGCT | 1950 |
| 275 | 293 | GGUCUCUGAGAGACUGAAG | 2266 | CUUCAGUCUCUCAGAGACC | 2319 | GGTCTCTGAGAGACTGAAG | 2387 |
| 219 | 237 | ACCUAUGAUAAACUCUGUA | 2267 | UACAGAGUUUAUCAUAGGU | 2320 | ACCTATGATAAACTCTGTA | 2388 |
| 186 | 204 | AAGCUCAAUAACUUAGUCU | 188 | AGACUAAGUUAUUGAGCUU | 598 | AAGCTCAATAACTTAGTCT | 2389 |
| 455 | 473 | UACAUUUGGAAAAAUAAAA | 2268 | UUUUAUUUUUCCAAAUGUA | 2321 | TACATTTGGAAAAATAAAA | 2390 |
| 197 | 215 | CUUAGUCUUGUUUGACAAA | 1712 | UUUGUCAAACAAGACUAAG | 1823 | CTTAGTCTTGTTTGACAAA | 1934 |
| 29 | 47 | CGGUGUCUGCUGCUAUUCU | 51 | AGAAUAGCAGCAGACACCG | 461 | CGGTGTCTGCTGCTATTCT | 1893 |
| 456 | 474 | ACAUUUGGAAAAAUAAAAC | 1771 | GUUUUAUUUUUCCAAAUGU | 1882 | ACATTTGGAAAAATAAAAC | 2009 |
| 34 | 52 | UCUGCUGCUAUUCUCCGAG | 2269 | CUCGGAGAAUAGCAGCAGA | 2322 | TCTGCTGCTATTCTCCGAG | 2391 |
| 423 | 441 | GGUGAAGAUGCAUGAAUAG | 1764 | CUAUUCAUGCAUCUUCACC | 1875 | GGTGAAGATGCATGAATAG | 1999 |
| 1 | 19 | CUUUUUGUCCGACAUCUUG | 1663 | CAAGAUGUCGGACAAAAAG | 1774 | CTTTTTGTCCGACATCTTG | 1885 |
| 348 | 366 | AUCAAACUGGUUUCAAAGC | 1746 | GCUUUGAAACCAGUUUGAU | 1857 | ATCAAACTGGTTTCAAAGC | 1978 |
| 240 | 258 | GAAGUUCCCAACUAUAAAC | 2270 | GUUUAUAGUUGGGAACUUC | 2323 | GAAGTTCCCAACTATAAAC | 2392 |
| 255 | 273 | AAACUUAUAACCCCAGCUG | 1725 | CAGCUGGGGUUAUAAGUUU | 1836 | AAACTTATAACCCCAGCTG | 1951 |
| 215 | 233 | AGCUACCUAUGAUAAACUC | 2271 | GAGUUUAUCAUAGGUAGCU | 2324 | AGCTACCTATGATAAACTC | 2393 |
| 382 | 400 | UUUACACCAGAAAUACCAA | 2272 | UUGGUAUUUCUGGUGUAAA | 2325 | TTTACACCAGAAATACCAA | 2394 |
| 353 | 371 | ACUGGUUUCAAAGCACAGA | 1747 | UCUGUGCUUUGAAACCAGU | 1858 | ACTGGTTTCAAAGCACAGA | 1979 |
| 326 | 344 | GGAGCUCCUUAGUAAAGGA | 1740 | UCCUUUACUAAGGAGCUCC | 1851 | GGAGCTCCTTAGTAAAGGA | 1971 |
| 202 | 220 | UCUUGUUUGACAAAGCUAC | 2273 | GUAGCUUUGUCAAACAAGA | 2326 | TCTTGTTTGACAAAGCTAC | 2395 |
| 45 | 63 | UCUCCGAGCUUCGCAAUGC | 1672 | GCAUUGCGAAGCUCGGAGA | 1783 | TCTCCGAGCTTCGCAATGC | 1898 |
| 419 | 437 | UGCUGGUGAAGAUGCAUGA | 1763 | UCAUGCAUCUUCACCAGCA | 1874 | TGCTGGTGAAGATGCATGA | 1998 |
| 178 | 196 | UUCGGGACAAGCUCAAUAA | 1708 | UUAUUGAGCUUGUCCCGAA | 1819 | TTCGGGACAAGCTCAATAA | 1928 |
| 44 | 62 | UUCUCCGAGCUUCGCAAUG | 2274 | CAUUGCGAAGCUCGGAGAA | 2327 | TTCTCCGAGCTTCGCAATG | 2396 |
| 335 | 353 | UAGUAAAGGACUUAUCAAA | 1743 | UUUGAUAAGUCCUUUACUA | 1854 | TAGTAAAGGACTTATCAAA | 1974 |
| 251 | 269 | CUAUAAACUUAUAACCCCA | 2275 | UGGGGUUAUAAGUUUAUAG | 2328 | CTATAAACTTATAACCCCA | 2397 |
| 374 | 392 | UCAAGUAAUUUACACCAGA | 2276 | UCUGGUGUAAAUUACUUGA | 2329 | TCAAGTAATTTACACCAGA | 2398 |
| 151 | 169 | AAAAGAAGAAGUGGUCCAA | 1702 | UUGGACCACUUCUUCUUUU | 1813 | AAAAGAAGAAGTGGTCCAA | 1921 |
| 164 | 182 | GUCCAAAGGCAAAGUUCGG | 2277 | CCGAACUUUGCCUUUGGAC | 2330 | GTCCAAAGGCAAAGTTCGG | 2399 |
| 253 | 271 | AUAAACUUAUAACCCCAGC | 2278 | GCUGGGGUUAUAAGUUUAU | 2331 | ATAAACTTATAACCCCAGC | 2400 |
| 32 | 50 | UGUCUGCUGCUAUUCUCCG | 2279 | CGGAGAAUAGCAGCAGACA | 2332 | TGTCTGCTGCTATTCTCCG | 2401 |
| 146 | 164 | GGCCAAAAAGAAGAAGUGG | 1700 | CCACUUCUUCUUUUUGGCC | 1811 | GGCCAAAAAGAAGAAGTGG | 1919 |
| 323 | 341 | UCAGGAGCUCCUUAGUAAA | 1739 | UUUACUAAGGAGCUCCUGA | 1850 | TCAGGAGCTCCTTAGTAAA | 1970 |
| 358 | 376 | UUUCAAAGCACAGAGCUCA | 1748 | UGAGCUCUGUGCUUUGAAA | 1859 | TTTCAAAGCACAGAGCTCA | 1980 |
| 241 | 259 | AAGUUCCCAACUAUAAACU | 243 | AGUUUAUAGUUGGGAACUU | 653 | AAGTTCCCAACTATAAACT | 2402 |
| 206 | 224 | GUUUGACAAAGCUACCUAU | 208 | AUAGGUAGCUUUGUCAAAC | 618 | GTTTGACAAAGCTACCTAT | 1937 |
| 328 | 346 | AGCUCCUUAGUAAAGGACU | 305 | AGUCCUUUACUAAGGAGCU | 715 | AGCTCCTTAGTAAAGGACT | 2403 |
| 213 | 231 | AAAGCUACCUAUGAUAAAC | 2280 | GUUUAUCAUAGGUAGCUUU | 2333 | AAAGCTACCTATGATAAAC | 2404 |
| 148 | 166 | CCAAAAAGAAGAAGUGGUC | 1701 | GACCACUUCUUCUUUUUGG | 1812 | CCAAAAAGAAGAAGTGGTC | 1920 |
| 37 | 55 | GCUGCUAUUCUCCGAGCUU | 59 | AAGCUCGGAGAAUAGCAGC | 469 | GCTGCTATTCTCCGAGCTT | 1896 |
| 349 | 367 | UCAAACUGGUUUCAAAGCA | 2281 | UGCUUUGAAACCAGUUUGA | 2334 | TCAAACTGGTTTCAAAGCA | 2405 |
| 365 | 383 | GCACAGAGCUCAAGUAAUU | 342 | AAUUACUUGAGCUCUGUGC | 752 | GCACAGAGCTCAAGTAATT | 1982 |
| 350 | 368 | CAAACUGGUUUCAAAGCAC | 2282 | GUGCUUUGAAACCAGUUUG | 2335 | CAAACTGGTTTCAAAGCAC | 2406 |
| 336 | 354 | AGUAAAGGACUUAUCAAAC | 2283 | GUUUGAUAAGUCCUUUACU | 2336 | AGTAAAGGACTTATCAAAC | 2407 |
| 337 | 355 | GUAAAGGACUUAUCAAACU | 314 | AGUUUGAUAAGUCCUUUAC | 724 | GTAAAGGACTTATCAAACT | 2408 |
| 214 | 232 | AAGCUACCUAUGAUAAACU | 216 | AGUUUAUCAUAGGUAGCUU | 626 | AAGCTACCTATGATAAACT | 2409 |
| 354 | 372 | CUGGUUUCAAAGCACAGAG | 2284 | CUCUGUGCUUUGAAACCAG | 2337 | CTGGTTTCAAAGCACAGAG | 2410 |
| 196 | 214 | ACUUAGUCUUGUUUGACAA | 2285 | UUGUCAAACAAGACUAAGU | 2338 | ACTTAGTCTTGTTTGACAA | 2411 |
| 236 | 254 | UAAGGAAGUUCCCAACUAU | 238 | AUAGUUGGGAACUUCCUUA | 648 | TAAGGAAGTTCCCAACTAT | 1945 |
| 357 | 375 | GUUUCAAAGCACAGAGCUC | 2286 | GAGCUCUGUGCUUUGAAAC | 2339 | GTTTCAAAGCACAGAGCTC | 2412 |

TABLE 7
RPS25 Modified duplex Sequences

| | | | | Sense | | Antisense | |
|---|---|---|---|---|---|---|---|
| Start | End | Target | SEQ | Oligo | SEQ | Oligo | SEQ |
| Site in | Site in | Sequence | ID | Sequence | ID | Sequence | ID |
| NM_001028.3 | NM_00128.3 | 5′ to 3′ | NO: | 5′ to 3′ | NO: | 5′ to 3′ | NO: |
| 245 | 263 | TCCCAACTATAA | 1948 | UCCCAACUAUAA | 2071 | UAUAAGUUUAUA | 2182 |
| | | ACTTATA | | ACUUAUAdTdT | | GUUGGGAdTdT | |
| 246 | 264 | CCCAACTATAAA | 2340 | CCCAACUAUAAA | 2413 | UUAUAAGUUUAU | 2466 |
| | | CTTATAA | | CUUAUAAdTdT | | AGUUGGGdTdT | |
| 188 | 206 | GCTCAATAACTT | 1931 | GCUCAAUAACUU | 2059 | CAAGACUAAGUU | 2170 |
| | | AGTCTTG | | AGUCUUGdTdT | | AUUGAGCdTdT | |
| 343 | 361 | GACTTATCAAAC | 1976 | GACUUAUCAAAC | 2093 | GAAACCAGUUUG | 2204 |
| | | TGGTTTC | | UGGUUUCdTdT | | AUAAGUCdTdT | |
| 244 | 262 | TTCCCAACTATA | 2341 | UUCCCAACUAUA | 1066 | AUAAGUUUAUAG | 1476 |
| | | AACTTAT | | AACUUAUdTdT | | UUGGGAAdTdT | |
| 189 | 207 | CTCAATAACTTA | 1932 | CUCAAUAACUUA | 1011 | ACAAGACUAAGU | 1421 |
| | | GTCTTGT | | GUCUUGUdTdT | | UAUUGAGdTdT | |
| 247 | 265 | CCAACTATAAAC | 2342 | CCAACUAUAAAC | 2414 | GUUAUAAGUUUA | 2467 |
| | | TTATAAC | | UUAUAACdTdT | | UAGUUGGdTdT | |
| 182 | 200 | GGACAAGCTCAA | 1930 | GGACAAGCUCAA | 2058 | UAAGUUAUUGAG | 2169 |
| | | TAACTTA | | UAACUUAdTdT | | CUUGUCCdTdT | |
| 181 | 199 | GGGACAAGCTCA | 1929 | GGGACAAGCUCA | 1003 | AAGUUAUUGAGC | 1413 |
| | | ATAACTT | | AUAACUUdTdT | | UUGUCCCdTdT | |
| 248 | 266 | CAACTATAAACT | 1949 | CAACUAUAAACU | 2072 | GGUUAUAAGUUU | 2183 |
| | | TATAACC | | UAUAACCdTdT | | AUAGUUGdTdT | |
| 243 | 261 | GTTCCCAACTAT | 1947 | GUUCCCAACUAU | 2070 | UAAGUUUAUAGU | 2181 |
| | | AAACTTA | | AAACUUAdTdT | | UGGGAACdTdT | |
| 187 | 205 | AGCTCAATAACT | 2343 | AGCUCAAUAACU | 1009 | AAGACUAAGUUA | 1419 |
| | | TAGTCTT | | UAGUCUUdTdT | | UUGAGCUdTdT | |
| 368 | 386 | CAGAGCTCAAGT | 1983 | CAGAGCUCAAGU | 2099 | GUAAAUUACUUG | 2210 |
| | | AATTTAC | | AAUUUACdTdT | | AGCUCUGdTdT | |
| 344 | 362 | ACTTATCAAACT | 2344 | ACUUAUCAAACU | 2415 | UGAAACCAGUUU | 2468 |
| | | GGTTTCA | | GGUUUCAdTdT | | GAUAAGUdTdT | |
| 330 | 348 | CTCCTTAGTAAA | 1972 | CUCCUUAGUAAA | 2090 | UAAGUCCUUUAC | 2201 |
| | | GGACTTA | | GGACUUAdTdT | | UAAGGAGdTdT | |
| 342 | 360 | GGACTTATCAAA | 2345 | GGACUUAUCAAA | 1139 | AAACCAGUUUGA | 1549 |
| | | CTGGTTT | | CUGGUUUdTdT | | UAAGUCCdTdT | |
| 345 | 363 | CTTATCAAACTG | 1977 | CUUAUCAAACUG | 2094 | UUGAAACCAGUU | 2205 |
| | | GTTTCAA | | GUUUCAAdTdT | | UGAUAAGdTdT | |
| 369 | 387 | AGAGCTCAAGTA | 1984 | AGAGCUCAAGUA | 2100 | UGUAAAUUACUU | 2211 |
| | | ATTTACA | | AUUUACAdTdT | | GAGCUCUdTdT | |
| 454 | 472 | GTACATTTGGAA | 2008 | GUACAUUUGGAA | 2119 | UUUAUUUUUCCA | 2230 |
| | | AAATAAA | | AAAUAAAdTdT | | AAUGUACdTdT | |
| 378 | 396 | GTAATTTACACC | 1986 | GUAAUUUACACC | 2102 | UAUUUCUGGUGU | 2213 |
| | | AGAAATA | | AGAAAUAdTdT | | AAAUUACdTdT | |
| 242 | 260 | AGTTCCCAACTA | 2346 | AGUUCCCAACUA | 1064 | AAGUUUAUAGUU | 1474 |
| | | TAAACTT | | UAAACUUdTdT | | GGGAACUdTdT | |
| 346 | 364 | TTATCAAACTGG | 2347 | UUAUCAAACUGG | 2416 | UUUGAAACCAGU | 2469 |
| | | TTTCAAA | | UUUCAAAdTdT | | UUGAUAAdTdT | |
| 347 | 365 | TATCAAACTGGT | 2348 | UAUCAAACUGGU | 2417 | CUUUGAAACCAG | 2470 |
| | | TTCAAAG | | UUCAAAGdTdT | | UUUGAUAdTdT | |
| 451 | 469 | GCTGTACATTTG | 2007 | GCUGUACAUUUG | 1248 | AUUUUUCCAAAU | 1658 |
| | | GAAAAAT | | GAAAAAUdTdT | | GUACAGCdTdT | |
| 333 | 351 | CTTAGTAAAGGA | 1973 | CUUAGUAAAGGA | 2091 | UGAUAAGUCCUU | 2202 |
| | | CTTATCA | | CUUAUCAdTdT | | UACUAAGdTdT | |
| 377 | 395 | AGTAATTTACAC | 2349 | AGUAAUUUACAC | 1174 | AUUUCUGGUGUA | 1584 |
| | | CAGAAAT | | CAGAAAUdTdT | | AAUUACUdTdT | |
| 452 | 470 | CTGTACATTTGG | 2350 | CUGUACAUUUGG | 2418 | UAUUUUUCCAAA | 2471 |
| | | AAAAATA | | AAAAAUAdTdT | | UGUACAGdTdT | |
| 183 | 201 | GACAAGCTCAAT | 2351 | GACAAGCUCAAU | 2419 | CUAAGUUAUUGA | 2472 |
| | | AACTTAG | | AACUUAGdTdT | | GCUUGUCdTdT | |
| 239 | 257 | GGAAGTTCCCAA | 1946 | GGAAGUUCCCAA | 2069 | UUUAUAGUUGGG | 2180 |
| | | CTATAAA | | CUAUAAAdTdT | | AACUUCCdTdT | |
| 372 | 390 | GCTCAAGTAATT | 2352 | GCUCAAGUAAUU | 2420 | UGGUGUAAAUUA | 2473 |
| | | TACACCA | | UACACCAdTdT | | CUUGAGCdTdT | |
| 217 | 235 | CTACCTATGATA | 1940 | CUACCUAUGAUA | 2064 | CAGAGUUUAUCA | 2175 |
| | | AACTCTG | | AACUCUGdTdT | | UAGGUAGdTdT | |
| 448 | 466 | CCAGCTGTACAT | 2006 | CCAGCUGUACAU | 2118 | UUUCCAAAUGUA | 2229 |
| | | TTGGAAA | | UUGGAAAdTdT | | CAGCUGGdTdT | |
| 329 | 347 | GCTCCTTAGTAA | 2353 | GCUCCUUAGUAA | 1126 | AAGUCCUUUACU | 1536 |
| | | AGGACTT | | AGGACUUdTdT | | AAGGAGCdTdT | |
| 331 | 349 | TCCTTAGTAAAG | 2354 | UCCUUAGUAAAG | 1128 | AUAAGUCCUUUA | 1538 |
| | | GACTTAT | | GACUUAUdTdT | | CUAAGGAdTdT | |
| 31 | 49 | GTGTCTGCTGCT | 1894 | GUGUCUGCUGCU | 2018 | GGAGAAUAGCAG | 2129 |
| | | ATTCTCC | | AUUCUCCdTdT | | CAGACACdTdT | |
| 179 | 197 | TCGGGACAAGCT | 2355 | UCGGGACAAGCU | 2421 | GUUAUUGAGCUU | 2474 |
| | | CAATAAC | | CAAUAACdTdT | | GUCCCGAdTdT | |
| 6 | 24 | TGTCCGACATCT | 1887 | UGUCCGACAUCU | 2014 | CUCGUCAAGAUG | 2125 |
| | | TGACGAG | | UGACGAGdTdT | | UCGGACAdTdT | |
| 220 | 238 | CCTATGATAAAC | 1941 | CCUAUGAUAAAC | 2065 | UUACAGAGUUUA | 2176 |
| | | TCTGTAA | | UCUGUAAdTdT | | UCAUAGGdTdT | |
| 376 | 394 | AAGTAATTTACA | 2356 | AAGUAAUUUACA | 2422 | UUUCUGGUGUAA | 2475 |
| | | CCAGAAA | | CCAGAAAdTdT | | AUUACUUdTdT | |
| 453 | 471 | TGTACATTTGGA | 2357 | UGUACAUUUGGA | 2423 | UUAUUUUUCCAA | 2476 |
| | | AAAATAA | | AAAAUAAdTdT | | AUGUACAdTdT | |
| 332 | 350 | CCTTAGTAAAGG | 2358 | CCUUAGUAAAGG | 2424 | GAUAAGUCCUUU | 2477 |
| | | ACTTATC | | ACUUAUCdTdT | | ACUAAGGdTdT | |
| 449 | 467 | CAGCTGTACATT | 2359 | CAGCUGUACAUU | 2425 | UUUUCCAAAUGU | 2478 |
| | | TGGAAAA | | UGGAAAAdTdT | | ACAGCUGdTdT | |
| 278 | 296 | CTCTGAGAGACT | 1957 | CUCUGAGAGACU | 1084 | AAUCUUCAGUCU | 1494 |
| | | GAAGATT | | GAAGAUUdTdT | | CUCAGAGdTdT | |
| 279 | 297 | TCTGAGAGACTG | 1958 | UCUGAGAGACUG | 2079 | GAAUCUUCAGUC | 2190 |
| | | AAGATTC | | AAGAUUCdTdT | | UCUCAGAdTdT | |
| 276 | 294 | GTCTCTGAGAGA | 2360 | GUCUCUGAGAGA | 2426 | UCUUCAGUCUCU | 2479 |
| | | CTGAAGA | | CUGAAGAdTdT | | CAGAGACdTdT | |
| 370 | 388 | GAGCTCAAGTAA | 2361 | GAGCUCAAGUAA | 2427 | GUGUAAAUUACU | 2480 |
| | | TTTACAC | | UUUACACdTdT | | UGAGCUCdTdT | |
| 229 | 247 | AACTCTGTAAGG | 1943 | AACUCUGUAAGG | 2067 | GGAACUUCCUUA | 2178 |
| | | AAGTTCC | | AAGUUCCdTdT | | CAGAGUUdTdT | |
| 185 | 203 | CAAGCTCAATAA | 2362 | CAAGCUCAAUAA | 2428 | GACUAAGUUAUU | 2481 |
| | | CTTAGTC | | CUUAGUCdTdT | | GAGCUUGdTdT | |
| 221 | 239 | CTATGATAAACT | 2363 | CUAUGAUAAACU | 2429 | CUUACAGAGUUU | 2482 |
| | | CTGTAAG | | CUGUAAGdTdT | | AUCAUAGdTdT | |
| 33 | 51 | GTCTGCTGCTAT | 1895 | GUCUGCUGCUAU | 2019 | UCGGAGAAUAGC | 2130 |
| | | TCTCCGA | | UCUCCGAdTdT | | AGCAGACdTdT | |
| 163 | 181 | GGTCCAAAGGCA | 1924 | GGUCCAAAGGCA | 2053 | CGAACUUUGCCU | 2164 |
| | | AAGTTCG | | AAGUUCGdTdT | | UUGGACCdTdT | |
| 373 | 391 | CTCAAGTAATTT | 1985 | CUCAAGUAAUUU | 2101 | CUGGUGUAAAUU | 2212 |
| | | ACACCAG | | ACACCAGdTdT | | ACUUGAGdTdT | |
| 375 | 393 | CAAGTAATTTAC | 2364 | CAAGUAAUUUAC | 2430 | UUCUGGUGUAAA | 2483 |
| | | ACCAGAA | | ACCAGAAdTdT | | UUACUUGdTdT | |
| 450 | 468 | AGCTGTACATTT | 2365 | AGCUGUACAUUU | 2431 | UUUUUCCAAAUG | 2484 |
| | | GGAAAAA | | GGAAAAAdTdT | | UACAGCUdTdT | |
| 180 | 198 | CGGGACAAGCTC | 2366 | CGGGACAAGCUC | 1002 | AGUUAUUGAGCU | 1412 |
| | | AATAACT | | AAUAACUdTdT | | UGUCCCGdTdT | |
| 190 | 208 | TCAATAACTTAG | 2367 | UCAAUAACUUAG | 1012 | AACAAGACUAAG | 1422 |
| | | TCTTGTT | | UCUUGUUdTdT | | UUAUUGAdTdT | |
| 203 | 221 | CTTGTTTGACAA | 1936 | CUUGUUUGACAA | 2062 | GGUAGCUUUGUC | 2173 |
| | | AGCTACC | | AGCUACCdTdT | | AAACAAGdTdT | |
| 462 | 480 | GGAAAAATAAAA | 2010 | GGAAAAAUAAAA | 2121 | AAUAAAGUUUUA | 2232 |
| | | CTTTATT | | CUUUAUUdTdT | | UUUUUCCdTdT | |
| 231 | 249 | CTCTGTAAGGAA | 1944 | CUCUGUAAGGAA | 2068 | UGGGAACUUCCU | 2179 |
| | | GTTCCCA | | GUUCCCAdTdT | | UACAGAGdTdT | |
| 30 | 48 | GGTGTCTGCTGC | 2368 | GGUGUCUGCUGC | 2432 | GAGAAUAGCAGC | 2485 |
| | | TATTCTC | | UAUUCUCdTdT | | AGACACCdTdT | |
| 200 | 218 | AGTCTTGTTTGA | 1935 | AGUCUUGUUUGA | 1022 | AGCUUUGUCAAA | 1432 |
| | | CAAAGCT | | CAAAGCUdTdT | | CAAGACUdTdT | |
| 216 | 234 | GCTACCTATGAT | 1939 | GCUACCUAUGAU | 1038 | AGAGUUUAUCAU | 1448 |
| | | AAACTCT | | AAACUCUdTdT | | AGGUAGCdTdT | |
| 341 | 359 | AGGACTTATCAA | 2369 | AGGACUUAUCAA | 1138 | AACCAGUUUGAU | 1548 |
| | | ACTGGTT | | ACUGGUUdTdT | | AAGUCCUdTdT | |
| 218 | 236 | TACCTATGATAA | 2370 | UACCUAUGAUAA | 1040 | ACAGAGUUUAUC | 1450 |
| | | ACTCTGT | | ACUCUGUdTdT | | AUAGGUAdTdT | |
| 461 | 479 | TGGAAAAATAAA | 2371 | UGGAAAAAUAAA | 2433 | AUAAAGUUUUAU | 2486 |
| | | ACTTTAT | | ACUUUAUdTdT | | UUUUCCAdTdT | |
| 162 | 180 | TGGTCCAAAGGC | 2372 | UGGUCCAAAGGC | 2434 | GAACUUUGCCUU | 2487 |
| | | AAAGTTC | | AAAGUUCdTdT | | UGGACCAdTdT | |
| 379 | 397 | TAATTTACACCA | 1987 | UAAUUUACACCA | 2103 | GUAUUUCUGGUG | 2214 |
| | | GAAATAC | | GAAAUACdTdT | | UAAAUUAdTdT | |
| 280 | 298 | CTGAGAGACTGA | 2373 | CUGAGAGACUGA | 2435 | CGAAUCUUCAGU | 2488 |
| | | AGATTCG | | AGAUUCGdTdT | | CUCUCAGdTdT | |
| 191 | 209 | CAATAACTTAGT | 2374 | CAAUAACUUAGU | 1013 | AAACAAGACUAA | 1423 |
| | | CTTGTTT | | CUUGUUUdTdT | | GUUAUUGdTdT | |
| 212 | 230 | CAAAGCTACCTA | 1938 | CAAAGCUACCUA | 2063 | UUUAUCAUAGGU | 2174 |
| | | TGATAAA | | UGAUAAAdTdT | | AGCUUUGdTdT | |
| 367 | 385 | ACAGAGCTCAAG | 2375 | ACAGAGCUCAAG | 2436 | UAAAUUACUUGA | 2489 |
| | | TAATTTA | | UAAUUUAdTdT | | GCUCUGUdTdT | |
| 230 | 248 | ACTCTGTAAGGA | 2376 | ACUCUGUAAGGA | 2437 | GGGAACUUCCUU | 2490 |
| | | AGTTCCC | | AGUUCCCdTdT | | ACAGAGUdTdT | |
| 274 | 292 | TGGTCTCTGAGA | 1956 | UGGUCUCUGAGA | 2078 | UUCAGUCUCUCA | 2189 |
| | | GACTGAA | | GACUGAAdTdT | | GAGACCAdTdT | |
| 366 | 384 | CACAGAGCTCAA | 2377 | CACAGAGCUCAA | 1163 | AAAUUACUUGAG | 1573 |
| | | GTAATTT | | GUAAUUUdTdT | | CUCUGUGdTdT | |
| 371 | 389 | AGCTCAAGTAAT | 2378 | AGCUCAAGUAAU | 2438 | GGUGUAAAUUAC | 2491 |
| | | TTACACC | | UUACACCdTdT | | UUGAGCUdTdT | |
| 447 | 465 | ACCAGCTGTACA | 2379 | ACCAGCUGUACA | 2439 | UUCCAAAUGUAC | 2492 |
| | | TTTGGAA | | UUUGGAAdTdT | | AGCUGGUdTdT | |
| 223 | 241 | ATGATAAACTCT | 2380 | AUGAUAAACUCU | 2440 | UCCUUACAGAGU | 2493 |
| | | GTAAGGA | | GUAAGGAdTdT | | UUAUCAUdTdT | |
| 460 | 478 | TTGGAAAAATAA | 2381 | UUGGAAAAAUAA | 2441 | UAAAGUUUUAUU | 2494 |
| | | AACTTTA | | AACUUUAdTdT | | UUUCCAAdTdT | |
| 184 | 202 | ACAAGCTCAATA | 2382 | ACAAGCUCAAUA | 1006 | ACUAAGUUAUUG | 1416 |
| | | ACTTAGT | | ACUUAGUdTdT | | AGCUUGUdTdT | |
| 277 | 295 | TCTCTGAGAGAC | 2383 | UCUCUGAGAGAC | 1083 | AUCUUCAGUCUC | 1493 |
| | | TGAAGAT | | UGAAGAUdTdT | | UCAGAGAdTdT | |
| 232 | 250 | TCTGTAAGGAAG | 2384 | UCUGUAAGGAAG | 2442 | UUGGGAACUUCC | 2495 |
| | | TTCCCAA | | UUCCCAAdTdT | | UUACAGAdTdT | |
| 64 | 82 | CGCCTAAGGACG | 1904 | CGCCUAAGGACG | 2027 | UUCUUGUCGUCC | 2138 |
| | | ACAAGAA | | ACAAGAAdTdT | | UUAGGCGdTdT | |
| 282 | 300 | GAGAGACTGAAG | 1959 | GAGAGACUGAAG | 2080 | CUCGAAUCUUCA | 2191 |
| | | ATTCGAG | | AUUCGAGdTdT | | GUCUCUCdTdT | |
| 224 | 242 | TGATAAACTCTG | 1942 | UGAUAAACUCUG | 2066 | UUCCUUACAGAG | 2177 |
| | | TAAGGAA | | UAAGGAAdTdT | | UUUAUCAdTdT | |
| 222 | 240 | TATGATAAACTC | 2385 | UAUGAUAAACUC | 2443 | CCUUACAGAGUU | 2496 |
| | | TGTAAGG | | UGUAAGGdTdT | | UAUCAUAdTdT | |
| 238 | 256 | AGGAAGTTCCCA | 2386 | AGGAAGUUCCCA | 2444 | UUAUAGUUGGGA | 2497 |
| | | ACTATAA | | ACUAUAAdTdT | | ACUUCCUdTdT | |
| 254 | 272 | TAAACTTATAAC | 1950 | UAAACUUAUAAC | 2073 | AGCUGGGGUUAU | 2184 |
| | | CCCAGCT | | CCCAGCUdTdT | | AAGUUUAdTdT | |
| 275 | 293 | GGTCTCTGAGAG | 2387 | GGUCUCUGAGAG | 2445 | CUUCAGUCUCUC | 2498 |
| | | ACTGAAG | | ACUGAAGdTdT | | AGAGACCdTdT | |
| 219 | 237 | ACCTATGATAAA | 2388 | ACCUAUGAUAAA | 2446 | UACAGAGUUUAU | 2499 |
| | | CTCTGTA | | CUCUGUAdTdT | | CAUAGGUdTdT | |
| 186 | 204 | AAGCTCAATAAC | 2389 | AAGCUCAAUAAC | 1008 | AGACUAAGUUAU | 1418 |
| | | TTAGTCT | | UUAGUCUdTdT | | UGAGCUUdTdT | |
| 455 | 473 | TACATTTGGAAA | 2390 | UACAUUUGGAAA | 2447 | UUUUAUUUUUCC | 2500 |
| | | AATAAAA | | AAUAAAAdTdT | | AAAUGUAdTdT | |
| 197 | 215 | CTTAGTCTTGTT | 1934 | CUUAGUCUUGUU | 2061 | UUUGUCAAACAA | 2172 |
| | | TGACAAA | | UGACAAAdTdT | | GACUAAGdTdT | |
| 29 | 47 | CGGTGTCTGCTG | 1893 | CGGUGUCUGCUG | 871 | AGAAUAGCAGCA | 1281 |
| | | CTATTCT | | CUAUUCUdTdT | | GACACCGdTdT | |
| 456 | 474 | ACATTTGGAAAA | 2009 | AGAUUUGGAAAA | 2120 | GUUUUAUUUUUC | 2231 |
| | | ATAAAAC | | AUAAAACdTdT | | CAAAUGUdTdT | |
| 34 | 52 | TCTGCTGCTATT | 2391 | UCUGCUGCUAUU | 2448 | CUCGGAGAAUAG | 2501 |
| | | CTCCGAG | | CUCCGAGdTdT | | CAGCAGAdTdT | |
| 423 | 441 | GGTGAAGATGCA | 1999 | GGUGAAGAUGCA | 2113 | CUAUUCAUGCAU | 2224 |
| | | TGAATAG | | UGAAUAGdTdT | | CUUCACCdTdT | |
| 1 | 19 | CTTTTTGTCCGA | 1885 | CUUUUUGUCCGA | 2012 | CAAGAUGUCGGA | 2123 |
| | | CATCTTG | | CAUCUUGdTdT | | CAAAAAGdTdT | |
| 348 | 366 | ATCAAACTGGTT | 1978 | AUCAAACUGGUU | 2095 | GCUUUGAAACCA | 2206 |
| | | TCAAAGC | | UCAAAGCdTdT | | GUUUGAUdTdT | |
| 240 | 258 | GAAGTTCCCAAC | 2392 | GAAGUUCCCAAC | 2449 | GUUUAUAGUUGG | 2502 |
| | | TATAAAC | | UAUAAACdTdT | | GAACUUCdTdT | |
| 255 | 273 | AAACTTATAACC | 1951 | AAACUUAUAACC | 2074 | CAGCUGGGGUUA | 2185 |
| | | CCAGCTG | | CCAGCUGdTdT | | UAAGUUUdTdT | |
| 215 | 233 | AGCTACCTATGA | 2393 | AGCUACCUAUGA | 2450 | GAGUUUAUCAUA | 2503 |
| | | TAAACTC | | UAAACUCdTdT | | GGUAGCUdTdT | |
| 382 | 400 | TTTACACCAGAA | 2394 | UUUACACCAGAA | 2451 | UUGGUAUUUCUG | 2504 |
| | | ATACCAA | | AUACCAAdTdT | | GUGUAAAdTdT | |
| 353 | 371 | ACTGGTTTCAAA | 1979 | ACUGGUUUCAAA | 2096 | UCUGUGCUUUGA | 2207 |
| | | GCACAGA | | GCACAGAdTdT | | AACCAGUdTdT | |
| 326 | 344 | GGAGCTCCTTAG | 1971 | GGAGCUCCUUAG | 2089 | UCCUUUACUAAG | 2200 |
| | | TAAAGGA | | UAAAGGAdTdT | | GAGCUCCdTdT | |
| 202 | 220 | TCTTGTTTGACA | 2395 | UCUUGUUUGACA | 2452 | GUAGCUUUGUCA | 2505 |
| | | AAGCTAC | | AAGCUACdTdT | | AACAAGAdTdT | |
| 45 | 63 | TCTCCGAGCTTC | 1898 | UCUCCGAGCUUC | 2021 | GCAUUGCGAAGC | 2132 |
| | | GCAATGC | | GCAAUGCdTdT | | UCGGAGAdTdT | |
| 419 | 437 | TGCTGGTGAAGA | 1998 | UGCUGGUGAAGA | 2112 | UCAUGCAUCUUC | 2223 |
| | | TGCATGA | | UGCAUGAdTdT | | ACCAGCAdTdT | |
| 178 | 196 | TTCGGGACAAGC | 1928 | UUCGGGACAAGC | 2057 | UUAUUGAGCUUG | 2168 |
| | | TCAATAA | | UCAAUAAdTdT | | UCCCGAAdTdT | |
| 44 | 62 | TTCTCCGAGCTT | 2396 | UUCUCCGAGCUU | 2453 | CAUUGCGAAGCU | 2506 |
| | | CGCAATG | | CGCAAUGdTdT | | CGGAGAAdTdT | |
| 335 | 353 | TAGTAAAGGACT | 1974 | UAGUAAAGGACU | 2092 | UUUGAUAAGUCC | 2203 |
| | | TATCAAA | | UAUCAAAdTdT | | UUUACUAdTdT | |
| 251 | 269 | CTATAAACTTAT | 2397 | CUAUAAACUUAU | 2454 | UGGGGUUAUAAG | 2507 |
| | | AACCCCA | | AACCCCAdTdT | | UUUAUAGdTdT | |
| 374 | 392 | TCAAGTAATTTA | 2398 | UCAAGUAAUUUA | 2455 | UCUGGUGUAAAU | 2508 |
| | | CACCAGA | | CACCAGAdTdT | | UACUUGAdTdT | |
| 151 | 169 | AAAAGAAGAAGT | 1921 | AAAAGAAGAAGU | 2051 | UUGGACCACUUC | 2162 |
| | | GGTCCAA | | GGUCCAAdTdT | | UUCUUUUdTdT | |
| 164 | 182 | GTCCAAAGGCAA | 2399 | GUCCAAAGGCAA | 2456 | CCGAACUUUGCC | 2509 |
| | | AGTTCGG | | AGUUCGGdTdT | | UUUGGACdTdT | |
| 253 | 271 | ATAAACTTATAA | 2400 | AUAAACUUAUAA | 2457 | GCUGGGGUUAUA | 2510 |
| | | CCCCAGC | | CCCCAGCdTdT | | AGUUUAUdTdT | |
| 32 | 50 | TGTCTGCTGCTA | 2401 | UGUCUGCUGCUA | 2458 | CGGAGAAUAGCA | 2511 |
| | | TTCTCCG | | UUCUCCGdTdT | | GCAGACAdTdT | |
| 146 | 164 | GGCCAAAAAGAA | 1919 | GGCCAAAAAGAA | 2049 | CCACUUCUUCUU | 2160 |
| | | GAAGTGG | | GAAGUGGdTdT | | UUUGGCCdTdT | |
| 323 | 341 | TCAGGAGCTCCT | 1970 | UCAGGAGCUCCU | 2088 | UUUACUAAGGAG | 2199 |
| | | TAGTAAA | | UAGUAAAdTdT | | CUCCUGAdTdT | |
| 358 | 376 | TTTCAAAGCACA | 1980 | UUUCAAAGCACA | 2097 | UGAGCUCUGUGC | 2208 |
| | | GAGCTCA | | GAGCUCAdTdT | | UUUGAAAdTdT | |
| 241 | 259 | AAGTTCCCAACT | 2402 | AAGUUCCCAACU | 1063 | AGUUUAUAGUUG | 1473 |
| | | ATAAACT | | AUAAACUdTdT | | GGAACUUdTdT | |
| 206 | 224 | GTTTGACAAAGC | 1937 | GUUUGACAAAGC | 1028 | AUAGGUAGCUUU | 1438 |
| | | TACCTAT | | UACCUAUdTdT | | GUCAAACdTdT | |
| 328 | 346 | AGCTCCTTAGTA | 2403 | AGCUCCUUAGUA | 1125 | AGUCCUUUACUA | 1535 |
| | | AAGGACT | | AAGGACUdTdT | | AGGAGCUdTdT | |
| 213 | 231 | AAAGCTACCTAT | 2404 | AAAGCUACCUAU | 2459 | GUUUAUCAUAGG | 2512 |
| | | GATAAAC | | GAUAAACdTdT | | UAGCUUUdTdT | |
| 148 | 166 | CCAAAAAGAAGA | 1920 | CCAAAAAGAAGA | 2050 | GACCACUUCUUC | 2161 |
| | | AGTGGTC | | AGUGGUCdTdT | | UUUUUGGdTdT | |
| 37 | 55 | GCTGCTATTCTC | 1896 | GCUGCUAUUCUC | 879 | AAGCUCGGAGAA | 1289 |
| | | CGAGCTT | | CGAGCUUdTdT | | UAGCAGCdTdT | |
| 349 | 367 | TCAAACTGGTTT | 2405 | UCAAACUGGUUU | 2460 | UGCUUUGAAACC | 2513 |
| | | CAAAGCA | | CAAAGCAdTdT | | AGUUUGAdTdT | |
| 365 | 383 | GCACAGAGCTCA | 1982 | GCACAGAGCUCA | 1162 | AAUUACUUGAGC | 1572 |
| | | AGTAATT | | AGUAAUUdTdT | | UCUGUGCdTdT | |
| 350 | 368 | CAAACTGGTTTC | 2406 | CAAACUGGUUUC | 2461 | GUGCUUUGAAAC | 2514 |
| | | AAAGCAC | | AAAGCACdTdT | | CAGUUUGdTdT | |
| 336 | 354 | AGTAAAGGACTT | 2407 | AGUAAAGGACUU | 2462 | GUUUGAUAAGUC | 2515 |
| | | ATCAAAC | | AUCAAACdTdT | | CUUUACUdTdT | |
| 337 | 355 | GTAAAGGACTTA | 2408 | GUAAAGGACUUA | 1134 | AGUUUGAUAAGU | 1544 |
| | | TCAAACT | | UCAAACUdTdT | | CCUUUACdTdT | |
| 214 | 232 | AAGCTACCTATG | 2409 | AAGCUACCUAUG | 1036 | AGUUUAUCAUAG | 1446 |
| | | ATAAACT | | AUAAACUdTdT | | GUAGCUUdTdT | |
| 354 | 372 | CTGGTTTCAAAG | 2410 | CUGGUUUCAAAG | 2463 | CUCUGUGCUUUG | 2516 |
| | | CACAGAG | | CACAGAGdTdT | | AAACCAGdTdT | |
| 196 | 214 | ACTTAGTCTTGT | 2411 | ACUUAGUCUUGU | 2464 | UUGUCAAACAAG | 2517 |
| | | TTGACAA | | UUGACAAdTdT | | ACUAAGUdTdT | |
| 236 | 254 | TAAGGAAGTTCC | 1945 | UAAGGAAGUUCC | 1058 | AUAGUUGGGAAC | 1468 |
| | | CAACTAT | | CAACUAUdTdT | | UUCCUUAdTdT | |
| 357 | 375 | GTTTCAAAGCAC | 2412 | GUUUCAAAGCAC | 2465 | GAGCUCUGUGCU | 2518 |
| | | AGAGCTC | | AGAGCUCdTdT | | UUGAAACdTdT | |

TABLE 8
RPS25 Unmodified duplex Sequences

| Start | End | Sense | SEQ | Antisense | SEQ | Target | SEQ |
|---|---|---|---|---|---|---|---|
| Site in | Site in | Oligo Sequence | ID | Oligo Sequence | ID | Sequence | ID |
| NM_001028.3 | NM_00128.3 | 5′ to 3′ | NO: | 5′ to 3′ | NO: | 5′ to 3′ | NO: |
| 1 | 19 | CUUUUUGUCCGACAUCUUG | 1663 | CAAGAUGUCGGACAAAAAG | 1774 | CTTTTTGTCCGACATCTTG | 1885 |
| 3 | 21 | UUUUGUCCGACAUCUUGAC | 1664 | GUCAAGAUGUCGGACAAAA | 1775 | TTTTGTCCGACATCTTGAC | 1886 |
| 6 | 24 | UGUCCGACAUCUUGACGAG | 1665 | CUCGUCAAGAUGUCGGACA | 1776 | TGTCCGACATCTTGACGAG | 1887 |
| 9 | 27 | CCGACAUCUUGACGAGGCU | 31 | AGCCUCGUCAAGAUGUCGG | 441 | CCGACATCTTGACGAGGCT | 1888 |
| 12 | 30 | ACAUCUUGACGAGGCUGCG | 1666 | CGCAGCCUCGUCAAGAUGU | 1777 | ACATCTTGACGAGGCTGCG | 1889 |
| 16 | 34 | CUUGACGAGGCUGCGGUGU | 38 | ACACCGCAGCCUCGUCAAG | 448 | CTTGACGAGGCTGCGGTGT | 1890 |
| 22 | 40 | GAGGCUGCGGUGUCUGCUG | 1667 | CAGCAGACACCGCAGCCUC | 1778 | GAGGCTGCGGTGTCTGCTG | 1891 |
| 25 | 43 | GCUGCGGUGUCUGCUGCUA | 1668 | UAGCAGCAGACACCGCAGC | 1779 | GCTGCGGTGTCTGCTGCTA | 1892 |
| 29 | 47 | CGGUGUCUGCUGCUAUUCU | 51 | AGAAUAGCAGCAGACACCG | 461 | CGGTGTCTGCTGCTATTCT | 1893 |
| 31 | 49 | GUGUCUGCUGCUAUUCUCC | 1669 | GGAGAAUAGCAGCAGACAC | 1780 | GTGTCTGCTGCTATTCTCC | 1894 |
| 33 | 51 | GUCUGCUGCUAUUCUCCGA | 1670 | UCGGAGAAUAGCAGCAGAC | 1781 | GTCTGCTGCTATTCTCCGA | 1895 |
| 37 | 55 | GCUGCUAUUCUCCGAGCUU | 59 | AAGCUCGGAGAAUAGCAGC | 469 | GCTGCTATTCTCCGAGCTT | 1896 |
| 42 | 60 | UAUUCUCCGAGCUUCGCAA | 1671 | UUGCGAAGCUCGGAGAAUA | 1782 | TATTCTCCGAGCTTCGCAA | 1897 |
| 45 | 63 | UCUCCGAGCUUCGCAAUGC | 1672 | GCAUUGCGAAGCUCGGAGA | 1783 | TCTCCGAGCTTCGCAATGC | 1898 |
| 48 | 66 | CCGAGCUUCGCAAUGCCGC | 1673 | GCGGCAUUGCGAAGCUCGG | 1784 | CCGAGCTTCGCAATGCCGC | 1899 |
| 53 | 71 | CUUCGCAAUGCCGCCUAAG | 1674 | CUUAGGCGGCAUUGCGAAG | 1785 | CTTCGCAATGCCGCCTAAG | 1900 |
| 54 | 72 | UUCGCAAUGCCGCCUAAGG | 1675 | CCUUAGGCGGCAUUGCGAA | 1786 | TTCGCAATGCCGCCTAAGG | 1901 |
| 60 | 78 | AUGCCGCCUAAGGACGACA | 1676 | UGUCGUCCUUAGGCGGCAU | 1787 | ATGCCGCCTAAGGACGACA | 1902 |
| 62 | 80 | GCCGCCUAAGGACGACAAG | 1677 | CUUGUCGUCCUUAGGCGGC | 1788 | GCCGCCTAAGGACGACAAG | 1903 |
| 64 | 82 | CGCCUAAGGACGACAAGAA | 1678 | UUCUUGUCGUCCUUAGGCG | 1789 | CGCCTAAGGACGACAAGAA | 1904 |
| 70 | 88 | AGGACGACAAGAAGAAGAA | 1679 | UUCUUCUUCUUGUCGUCCU | 1790 | AGGACGACAAGAAGAAGAA | 2520 |
| 71 | 89 | GGACGACAAGAAGAAGAAG | 1680 | CUUCUUCUUCUUGUCGUCC | 1791 | GGACGACAAGAAGAAGAAG | 2521 |
| 76 | 94 | ACAAGAAGAAGAAGGACGC | 1681 | GCGUCCUUCUUCUUCUUGU | 1792 | ACAAGAAGAAGAAGGACGC | 2522 |
| 79 | 97 | AGAAGAAGAAGGACGCUGG | 1682 | CCAGCGUCCUUCUUCUUCU | 1793 | AGAAGAAGAAGGACGCTGG | 1905 |
| 83 | 101 | GAAGAAGGACGCUGGAAAG | 1683 | CUUUCCAGCGUCCUUCUUC | 1794 | GAAGAAGGACGCTGGAAAG | 1906 |
| 85 | 103 | AGAAGGACGCUGGAAAGUC | 1684 | GACUUUCCAGCGUCCUUCU | 1795 | AGAAGGACGCTGGAAAGTC | 1907 |
| 91 | 109 | ACGCUGGAAAGUCGGCCAA | 1685 | UUGGCCGACUUUCCAGCGU | 1796 | ACGCTGGAAAGTCGGCCAA | 1908 |
| 94 | 112 | CUGGAAAGUCGGCCAAGAA | 1686 | UUCUUGGCCGACUUUCCAG | 1797 | CTGGAAAGTCGGCCAAGAA | 1909 |
| 96 | 114 | GGAAAGUCGGCCAAGAAAG | 1687 | CUUUCUUGGCCGACUUUCC | 1798 | GGAAAGTCGGCCAAGAAAG | 1910 |
| 101 | 119 | GUCGGCCAAGAAAGACAAA | 1688 | UUUGUCUUUCUUGGCCGAC | 1799 | GTCGGCCAAGAAAGACAAA | 1911 |
| 103 | 121 | CGGCCAAGAAAGACAAAGA | 1689 | UCUUUGUCUUUCUUGGCCG | 1800 | CGGCCAAGAAAGACAAAGA | 2523 |
| 107 | 125 | CAAGAAAGACAAAGACCCA | 1690 | UGGGUCUUUGUCUUUCUUG | 1801 | CAAGAAAGACAAAGACCCA | 2524 |
| 109 | 127 | AGAAAGACAAAGACCCAGU | 130 | ACUGGGUCUUUGUCUUUCU | 540 | AGAAAGACAAAGACCCAGT | 1912 |
| 115 | 133 | ACAAAGACCCAGUGAACAA | 1691 | UUGUUCACUGGGUCUUUGU | 1802 | ACAAAGACCCAGTGAACAA | 1913 |
| 116 | 134 | CAAAGACCCAGUGAACAAA | 1692 | UUUGUUCACUGGGUCUUUG | 1803 | CAAAGACCCAGTGAACAAA | 1914 |
| 120 | 138 | GACCCAGUGAACAAAUCCG | 1693 | CGGAUUUGUUCACUGGGUC | 1804 | GACCCAGTGAACAAATCCG | 1915 |
| 125 | 143 | AGUGAACAAAUCCGGGGGC | 1694 | GCCCCCGGAUUUGUUCACU | 1805 | AGTGAACAAATCCGGGGGC | 1916 |
| 127 | 145 | UGAACAAAUCCGGGGGCAA | 1695 | UUGCCCCCGGAUUUGUUCA | 1806 | TGAACAAATCCGGGGGCAA | 1917 |
| 130 | 148 | ACAAAUCCGGGGGCAAGGC | 1696 | GCCUUGCCCCCGGAUUUGU | 1807 | ACAAATCCGGGGGCAAGGC | 1918 |
| 136 | 154 | CCGGGGGCAAGGCCAAAAA | 1697 | UUUUUGGCCUUGCCCCCGG | 1808 | CCGGGGGCAAGGCCAAAAA | 2525 |
| 140 | 158 | GGGCAAGGCCAAAAAGAAG | 1698 | CUUCUUUUUGGCCUUGCCC | 1809 | GGGCAAGGCCAAAAAGAAG | 2526 |
| 142 | 160 | GCAAGGCCAAAAAGAAGAA | 1699 | UUCUUCUUUUUGGCCUUGC | 1810 | GCAAGGCCAAAAAGAAGAA | 2527 |
| 146 | 164 | GGCCAAAAAGAAGAAGUGG | 1700 | CCACUUCUUCUUUUUGGCC | 1811 | GGCCAAAAAGAAGAAGTGG | 1919 |
| 148 | 166 | CCAAAAAGAAGAAGUGGUC | 1701 | GACCACUUCUUCUUUUUGG | 1812 | CCAAAAAGAAGAAGTGGTC | 1920 |
| 151 | 169 | AAAAGAAGAAGUGGUCCAA | 1702 | UUGGACCACUUCUUCUUUU | 1813 | AAAAGAAGAAGTGGTCCAA | 1921 |
| 154 | 172 | AGAAGAAGUGGUCCAAAGG | 1703 | CCUUUGGACCACUUCUUCU | 1814 | AGAAGAAGTGGTCCAAAGG | 1922 |
| 160 | 178 | AGUGGUCCAAAGGCAAAGU | 162 | ACUUUGCCUUUGGACCACU | 572 | AGTGGTCCAAAGGCAAAGT | 1923 |
| 163 | 181 | GGUCCAAAGGCAAAGUUCG | 1704 | CGAACUUUGCCUUUGGACC | 1815 | GGTCCAAAGGCAAAGTTCG | 1924 |
| 165 | 183 | UCCAAAGGCAAAGUUCGGG | 1705 | CCCGAACUUUGCCUUUGGA | 1816 | TCCAAAGGCAAAGTTCGGG | 1925 |
| 169 | 187 | AAGGCAAAGUUCGGGACAA | 1706 | UUGUCCCGAACUUUGCCUU | 1817 | AAGGCAAAGTTCGGGACAA | 1926 |
| 173 | 191 | CAAAGUUCGGGACAAGCUC | 1707 | GAGCUUGUCCCGAACUUUG | 1818 | CAAAGTTCGGGACAAGCTC | 1927 |
| 178 | 196 | UUCGGGACAAGCUCAAUAA | 1708 | UUAUUGAGCUUGUCCCGAA | 1819 | TTCGGGACAAGCTCAATAA | 1928 |
| 181 | 199 | GGGACAAGCUCAAUAACUU | 183 | AAGUUAUUGAGCUUGUCCC | 593 | GGGACAAGCTCAATAACTT | 1929 |
| 182 | 200 | GGACAAGCUCAAUAACUUA | 1709 | UAAGUUAUUGAGCUUGUCC | 1820 | GGACAAGCTCAATAACTTA | 1930 |
| 188 | 206 | GCUCAAUAACUUAGUCUUG | 1710 | CAAGACUAAGUUAUUGAGC | 1821 | GCTCAATAACTTAGTCTTG | 1931 |
| 189 | 207 | CUCAAUAACUUAGUCUUGU | 191 | ACAAGACUAAGUUAUUGAG | 601 | CTCAATAACTTAGTCTTGT | 1932 |
| 192 | 210 | AAUAACUUAGUCUUGUUUG | 1711 | CAAACAAGACUAAGUUAUU | 1822 | AATAACTTAGTCTTGTTTG | 1933 |
| 197 | 215 | CUUAGUCUUGUUUGACAAA | 1712 | UUUGUCAAACAAGACUAAG | 1823 | CTTAGTCTTGTTTGACAAA | 1934 |
| 200 | 218 | AGUCUUGUUUGACAAAGCU | 202 | AGCUUUGUCAAACAAGACU | 612 | AGTCTTGTTTGACAAAGCT | 1935 |
| 203 | 221 | CUUGUUUGACAAAGCUACC | 1713 | GGUAGCUUUGUCAAACAAG | 1824 | CTTGTTTGACAAAGCTACC | 1936 |
| 206 | 224 | GUUUGACAAAGCUACCUAU | 208 | AUAGGUAGCUUUGUCAAAC | 618 | GTTTGACAAAGCTACCTAT | 1937 |
| 212 | 230 | CAAAGCUACCUAUGAUAAA | 1714 | UUUAUCAUAGGUAGCUUUG | 1825 | CAAAGCTACCTATGATAAA | 1938 |
| 216 | 234 | GCUACCUAUGAUAAACUCU | 218 | AGAGUUUAUCAUAGGUAGC | 628 | GCTACCTATGATAAACTCT | 1939 |
| 217 | 235 | CUACCUAUGAUAAACUCUG | 1715 | CAGAGUUUAUCAUAGGUAG | 1826 | CTACCTATGATAAACTCTG | 1940 |
| 220 | 238 | CCUAUGAUAAACUCUGUAA | 1716 | UUACAGAGUUUAUCAUAGG | 1827 | CCTATGATAAACTCTGTAA | 1941 |
| 224 | 242 | UGAUAAACUCUGUAAGGAA | 1717 | UUCCUUACAGAGUUUAUCA | 1828 | TGATAAACTCTGTAAGGAA | 1942 |
| 229 | 247 | AACUCUGUAAGGAAGUUCC | 1718 | GGAACUUCCUUACAGAGUU | 1829 | AACTCTGTAAGGAAGTTCC | 1943 |
| 231 | 249 | CUCUGUAAGGAAGUUCCCA | 1719 | UGGGAACUUCCUUACAGAG | 1830 | CTCTGTAAGGAAGTTCCCA | 1944 |
| 236 | 254 | UAAGGAAGUUCCCAACUAU | 238 | AUAGUUGGGAACUUCCUUA | 648 | TAAGGAAGTTCCCAACTAT | 1945 |
| 239 | 257 | GGAAGUUCCCAACUAUAAA | 1720 | UUUAUAGUUGGGAACUUCC | 1831 | GGAAGTTCCCAACTATAAA | 1946 |
| 243 | 261 | GUUCCCAACUAUAAACUUA | 1721 | UAAGUUUAUAGUUGGGAAC | 1832 | GTTCCCAACTATAAACTTA | 1947 |
| 245 | 263 | UCCCAACUAUAAACUUAUA | 1722 | UAUAAGUUUAUAGUUGGGA | 1833 | TCCCAACTATAAACTTATA | 1948 |
| 248 | 266 | CAACUAUAAACUUAUAACC | 1723 | GGUUAUAAGUUUAUAGUUG | 1834 | CAACTATAAACTTATAACC | 1949 |
| 254 | 272 | UAAACUUAUAACCCCAGCU | 1724 | AGCUGGGGUUAUAAGUUUA | 1835 | TAAACTTATAACCCCAGCT | 1950 |
| 255 | 273 | AAACUUAUAACCCCAGCUG | 1725 | CAGCUGGGGUUAUAAGUUU | 1836 | AAACTTATAACCCCAGCTG | 1951 |
| 258 | 276 | CUUAUAACCCCAGCUGUGG | 1726 | CCACAGCUGGGGUUAUAAG | 1837 | CTTATAACCCCAGCTGTGG | 1952 |
| 264 | 282 | ACCCCAGCUGUGGUCUCUG | 1727 | CAGAGACCACAGCUGGGGU | 1838 | ACCCCAGCTGTGGTCTCTG | 1953 |
| 267 | 285 | CCAGCUGUGGUCUCUGAGA | 1728 | UCUCAGAGACCACAGCUGG | 1839 | CCAGCTGTGGTCTCTGAGA | 1954 |
| 271 | 289 | CUGUGGUCUCUGAGAGACU | 257 | AGUCUCUCAGAGACCACAG | 667 | CTGTGGTCTCTGAGAGACT | 1955 |
| 274 | 292 | UGGUCUCUGAGAGACUGAA | 1729 | UUCAGUCUCUCAGAGACCA | 1840 | TGGTCTCTGAGAGACTGAA | 1956 |
| 278 | 296 | CUCUGAGAGACUGAAGAUU | 264 | AAUCUUCAGUCUCUCAGAG | 674 | CTCTGAGAGACTGAAGATT | 1957 |
| 279 | 297 | UCUGAGAGACUGAAGAUUC | 1730 | GAAUCUUCAGUCUCUCAGA | 1841 | TCTGAGAGACTGAAGATTC | 1958 |
| 282 | 300 | GAGAGACUGAAGAUUCGAG | 1731 | CUCGAAUCUUCAGUCUCUC | 1842 | GAGAGACTGAAGATTCGAG | 1959 |
| 287 | 305 | ACUGAAGAUUCGAGGCUCC | 1732 | GGAGCCUCGAAUCUUCAGU | 1843 | ACTGAAGATTCGAGGCTCC | 1960 |
| 289 | 307 | UGAAGAUUCGAGGCUCCCU | 275 | AGGGAGCCUCGAAUCUUCA | 685 | TGAAGATTCGAGGCTCCCT | 1961 |
| 293 | 311 | GAUUCGAGGCUCCCUGGCC | 1733 | GGCCAGGGAGCCUCGAAUC | 1844 | GATTCGAGGCTCCCTGGCC | 1962 |
| 298 | 316 | GAGGCUCCCUGGCCAGGGC | 1734 | GCCCUGGCCAGGGAGCCUC | 1845 | GAGGCTCCCTGGCCAGGGC | 1963 |
| 302 | 320 | CUCCCUGGCCAGGGCAGCC | 1735 | GGCUGCCCUGGCCAGGGAG | 1846 | CTCCCTGGCCAGGGCAGCC | 1964 |
| 306 | 324 | CUGGCCAGGGCAGCCCUUC | 1736 | GAAGGGCUGCCCUGGCCAG | 1847 | CTGGCCAGGGCAGCCCTTC | 1965 |
| 308 | 326 | GGCCAGGGCAGCCCUUCAG | 1737 | CUGAAGGGCUGCCCUGGCC | 1848 | GGCCAGGGCAGCCCTTCAG | 1966 |
| 313 | 331 | GGGCAGCCCUUCAGGAGCU | 290 | AGCUCCUGAAGGGCUGCCC | 700 | GGGCAGCCCTTCAGGAGCT | 1967 |
| 316 | 334 | CAGCCCUUCAGGAGCUCCU | 293 | AGGAGCUCCUGAAGGGCUG | 703 | CAGCCCTTCAGGAGCTCCT | 1968 |
| 318 | 336 | GCCCUUCAGGAGCUCCUUA | 1738 | UAAGGAGCUCCUGAAGGGC | 1849 | GCCCTTCAGGAGCTCCTTA | 1969 |
| 323 | 341 | UCAGGAGCUCCUUAGUAAA | 1739 | UUUACUAAGGAGCUCCUGA | 1850 | TCAGGAGCTCCTTAGTAAA | 1970 |
| 326 | 344 | GGAGCUCCUUAGUAAAGGA | 1740 | UCCUUUACUAAGGAGCUCC | 1851 | GGAGCTCCTTAGTAAAGGA | 1971 |
| 330 | 348 | CUCCUUAGUAAAGGACUUA | 1741 | UAAGUCCUUUACUAAGGAG | 1852 | CTCCTTAGTAAAGGACTTA | 1972 |
| 333 | 351 | CUUAGUAAAGGACUUAUCA | 1742 | UGAUAAGUCCUUUACUAAG | 1853 | CTTAGTAAAGGACTTATCA | 1973 |
| 335 | 353 | UAGUAAAGGACUUAUCAAA | 1743 | UUUGAUAAGUCCUUUACUA | 1854 | TAGTAAAGGACTTATCAAA | 1974 |
| 340 | 358 | AAGGACUUAUCAAACUGGU | 317 | ACCAGUUUGAUAAGUCCUU | 727 | AAGGACTTATCAAACTGGT | 1975 |
| 343 | 361 | GACUUAUCAAACUGGUUUC | 1744 | GAAACCAGUUUGAUAAGUC | 1855 | GACTTATCAAACTGGTTTC | 1976 |
| 345 | 363 | CUUAUCAAACUGGUUUCAA | 1745 | UUGAAACCAGUUUGAUAAG | 1856 | CTTATCAAACTGGTTTCAA | 1977 |
| 348 | 366 | AUCAAACUGGUUUCAAAGC | 1746 | GCUUUGAAACCAGUUUGAU | 1857 | ATCAAACTGGTTTCAAAGC | 1978 |
| 353 | 371 | ACUGGUUUCAAAGCACAGA | 1747 | UCUGUGCUUUGAAACCAGU | 1858 | ACTGGTTTCAAAGCACAGA | 1979 |
| 358 | 376 | UUUCAAAGCACAGAGCUCA | 1748 | UGAGCUCUGUGCUUUGAAA | 1859 | TTTCAAAGCACAGAGCTCA | 1980 |
| 359 | 377 | UUCAAAGCACAGAGCUCAA | 1749 | UUGAGCUCUGUGCUUUGAA | 1860 | TTCAAAGCACAGAGCTCAA | 1981 |
| 365 | 383 | GCACAGAGCUCAAGUAAUU | 342 | AAUUACUUGAGCUCUGUGC | 752 | GCACAGAGCTCAAGTAATT | 1982 |
| 368 | 386 | CAGAGCUCAAGUAAUUUAC | 1750 | GUAAAUUACUUGAGCUCUG | 1861 | CAGAGCTCAAGTAATTTAC | 1983 |
| 369 | 387 | AGAGCUCAAGUAAUUUACA | 1751 | UGUAAAUUACUUGAGCUCU | 1862 | AGAGCTCAAGTAATTTACA | 1984 |
| 373 | 391 | CUCAAGUAAUUUACACCAG | 1752 | CUGGUGUAAAUUACUUGAG | 1863 | CTCAAGTAATTTACACCAG | 1985 |
| 378 | 396 | GUAAUUUACACCAGAAAUA | 1753 | UAUUUCUGGUGUAAAUUAC | 1864 | GTAATTTACACCAGAAATA | 1986 |
| 379 | 397 | UAAUUUACACCAGAAAUAC | 1754 | GUAUUUCUGGUGUAAAUUA | 1865 | TAATTTACACCAGAAATAC | 1987 |
| 384 | 402 | UACACCAGAAAUACCAAGG | 1755 | CCUUGGUAUUUCUGGUGUA | 1866 | TACACCAGAAATACCAAGG | 1988 |
| 387 | 405 | ACCAGAAAUACCAAGGGUG | 1756 | CACCCUUGGUAUUUCUGGU | 1867 | ACCAGAAATACCAAGGGTG | 1989 |
| 390 | 408 | AGAAAUACCAAGGGUGGAG | 1757 | CUCCACCCUUGGUAUUUCU | 1868 | AGAAATACCAAGGGTGGAG | 1990 |
| 393 | 411 | AAUACCAAGGGUGGAGAUG | 1758 | CAUCUCCACCCUUGGUAUU | 1869 | AATACCAAGGGTGGAGATG | 1991 |
| 399 | 417 | AAGGGUGGAGAUGCUCCAG | 1759 | CUGGAGCAUCUCCACCCUU | 1870 | AAGGGTGGAGATGCTCCAG | 1992 |
| 402 | 420 | GGUGGAGAUGCUCCAGCUG | 1760 | CAGCUGGAGCAUCUCCACC | 1871 | GGTGGAGATGCTCCAGCTG | 1993 |
| 404 | 422 | UGGAGAUGCUCCAGCUGCU | 381 | AGCAGCUGGAGCAUCUCCA | 791 | TGGAGATGCTCCAGCTGCT | 1994 |
| 410 | 428 | UGCUCCAGCUGCUGGUGAA | 1761 | UUCACCAGCAGCUGGAGCA | 1872 | TGCTCCAGCTGCTGGTGAA | 1995 |
| 411 | 429 | GCUCCAGCUGCUGGUGAAG | 1762 | CUUCACCAGCAGCUGGAGC | 1873 | GCTCCAGCTGCTGGTGAAG | 1996 |
| 417 | 435 | GCUGCUGGUGAAGAUGCAU | 394 | AUGCAUCUUCACCAGCAGC | 804 | GCTGCTGGTGAAGATGCAT | 1997 |
| 419 | 437 | UGCUGGUGAAGAUGCAUGA | 1763 | UCAUGCAUCUUCACCAGCA | 1874 | TGCTGGTGAAGATGCATGA | 1998 |
| 423 | 441 | GGUGAAGAUGCAUGAAUAG | 1764 | CUAUUCAUGCAUCUUCACC | 1875 | GGTGAAGATGCATGAATAG | 1999 |
| 426 | 444 | GAAGAUGCAUGAAUAGGUC | 1765 | GACCUAUUCAUGCAUCUUC | 1876 | GAAGATGCATGAATAGGTC | 2000 |
| 430 | 448 | AUGCAUGAAUAGGUCCAAC | 1766 | GUUGGACCUAUUCAUGCAU | 1877 | ATGCATGAATAGGTCCAAC | 2001 |
| 432 | 450 | GCAUGAAUAGGUCCAACCA | 1767 | UGGUUGGACCUAUUCAUGC | 1878 | GCATGAATAGGTCCAACCA | 2002 |
| 435 | 453 | UGAAUAGGUCCAACCAGCU | 412 | AGCUGGUUGGACCUAUUCA | 822 | TGAATAGGTCCAACCAGCT | 2003 |
| 441 | 459 | GGUCCAACCAGCUGUACAU | 418 | AUGUACAGCUGGUUGGACC | 828 | GGTCCAACCAGCTGTACAT | 2004 |
| 444 | 462 | CCAACCAGCUGUACAUUUG | 1768 | CAAAUGUACAGCUGGUUGG | 1879 | CCAACCAGCTGTACATTTG | 2005 |
| 448 | 466 | CCAGCUGUACAUUUGGAAA | 1769 | UUUCCAAAUGUACAGCUGG | 1880 | CCAGCTGTACATTTGGAAA | 2006 |
| 451 | 469 | GCUGUACAUUUGGAAAAAU | 428 | AUUUUUCCAAAUGUACAGC | 838 | GCTGTACATTTGGAAAAAT | 2007 |
| 454 | 472 | GUACAUUUGGAAAAAUAAA | 1770 | UUUAUUUUUCCAAAUGUAC | 1881 | GTACATTTGGAAAAATAAA | 2008 |
| 456 | 474 | ACAUUUGGAAAAAUAAAAC | 1771 | GUUUUAUUUUUCCAAAUGU | 1882 | ACATTTGGAAAAATAAAAC | 2009 |
| 462 | 480 | GGAAAAAUAAAACUUUAUU | 1772 | AAUAAAGUUUUAUUUUUCC | 1883 | GGAAAAATAAAACTTTATT | 2010 |
| 465 | 483 | AAAAUAAAACUUUAUUAAA | 1773 | UUUAAUAAAGUUUUAUUUU | 1884 | AAAATAAAACTTTATTAAA | 2011 |

TABLE 9
RPS25 Modified duplex Sequences

| Start | End | | SEQ | Sense | SEQ | Antisense | SEQ |
|---|---|---|---|---|---|---|---|
| Site in | Site in | Target Sequence | ID | Oligo Sequence | ID | Oligo Sequence | ID |
| NM_001028.3 | NM_00128.3 | 5′ to 3′ | NO: | 5′ to 3′ | NO: | 5′ to 3′ | NO: |
| 1 | 19 | CTTTTTGTCCGACATCTTG | 1885 | CUUUUUGUCCGACAUCUUGdTdT | 2012 | CAAGAUGUCGGACAAAAAGdTdT | 2123 |
| 3 | 21 | TTTTGTCCGACATCTTGAC | 1886 | UUUUGUCCGACAUCUUGACdTdT | 2013 | GUCAAGAUGUCGGACAAAAdTdT | 2124 |
| 6 | 24 | TGTCCGACATCTTGACGAG | 1887 | UGUCCGACAUCUUGACGAGdTdT | 2014 | CUCGUCAAGAUGUCGGACAdTdT | 2125 |
| 9 | 27 | CCGACATCTTGACGAGGCT | 1888 | CCGACAUCUUGACGAGGCUdTdT | 851 | AGCCUCGUCAAGAUGUCGGdTdT | 1261 |
| 12 | 30 | ACATCTTGACGAGGCTGCG | 1889 | ACAUCUUGACGAGGCUGCGdTdT | 2015 | CGCAGCCUCGUCAAGAUGUdTdT | 2126 |
| 16 | 34 | CTTGACGAGGCTGCGGTGT | 1890 | CUUGACGAGGCUGCGGUGUdTdT | 858 | ACACCGCAGCCUCGUCAAGdTdT | 1268 |
| 22 | 40 | GAGGCTGCGGTGTCTGCTG | 1891 | GAGGCUGCGGUGUCUGCUGdTdT | 2016 | CAGCAGACACCGCAGCCUCdTdT | 2127 |
| 25 | 43 | GCTGCGGTGTCTGCTGCTA | 1892 | GCUGCGGUGUCUGCUGCUAdTdT | 2017 | UAGCAGCAGACACCGCAGCdTdT | 2128 |
| 29 | 47 | CGGTGTCTGCTGCTATTCT | 1893 | CGGUGUCUGCUGCUAUUCUdTdT | 871 | AGAAUAGCAGCAGACACCGdTdT | 1281 |
| 31 | 49 | GTGTCTGCTGCTATTCTCC | 1894 | GUGUCUGCUGCUAUUCUCCdTdT | 2018 | GGAGAAUAGCAGCAGACACdTdT | 2129 |
| 33 | 51 | GTCTGCTGCTATTCTCCGA | 1895 | GUCUGCUGCUAUUCUCCGAdTdT | 2019 | UCGGAGAAUAGCAGCAGACdTdT | 2130 |
| 37 | 55 | GCTGCTATTCTCCGAGCTT | 1896 | GCUGCUAUUCUCCGAGCUUdTdT | 879 | AAGCUCGGAGAAUAGCAGCdTdT | 1289 |
| 42 | 60 | TATTCTCCGAGCTTCGCAA | 1897 | UAUUCUCCGAGCUUCGCAAdTdT | 2020 | UUGCGAAGCUCGGAGAAUAdTdT | 2131 |
| 45 | 63 | TCTCCGAGCTTCGCAATGC | 1898 | UCUCCGAGCUUCGCAAUGCdTdT | 2021 | GCAUUGCGAAGCUCGGAGAdTdT | 2132 |
| 48 | 66 | CCGAGCTTCGCAATGCCGC | 1899 | CCGAGCUUCGCAAUGCCGCdTdT | 2022 | GCGGCAUUGCGAAGCUCGGdTdT | 2133 |
| 53 | 71 | CTTCGCAATGCCGCCTAAG | 1900 | CUUCGCAAUGCCGCCUAAGdTdT | 2023 | CUUAGGCGGCAUUGCGAAGdTdT | 2134 |
| 54 | 72 | TTCGCAATGCCGCCTAAGG | 1901 | UUCGCAAUGCCGCCUAAGGdTdT | 2024 | CCUUAGGCGGCAUUGCGAAdTdT | 2135 |
| 60 | 78 | ATGCCGCCTAAGGACGACA | 1902 | AUGCCGCCUAAGGACGACAdTdT | 2025 | UGUCGUCCUUAGGCGGCAUdTdT | 2136 |
| 62 | 80 | GCCGCCTAAGGACGACAAG | 1903 | GCCGCCUAAGGACGACAAGdTdT | 2026 | CUUGUCGUCCUUAGGCGGCdTdT | 2137 |
| 64 | 82 | CGCCTAAGGACGACAAGAA | 1904 | CGCCUAAGGACGACAAGAAdTdT | 2027 | UUCUUGUCGUCCUUAGGCGdTdT | 2138 |
| 70 | 88 | AGGACGACAAGAAGAAGAA | 2520 | AGGACGACAAGAAGAAGAAdTdT | 2028 | UUCUUCUUCUUGUCGUCCUdTdT | 2139 |
| 71 | 89 | GGACGACAAGAAGAAGAAG | 2521 | GGACGACAAGAAGAAGAAGdTdT | 2029 | CUUCUUCUUCUUGUCGUCCdTdT | 2140 |
| 76 | 94 | ACAAGAAGAAGAAGGACGC | 2522 | ACAAGAAGAAGAAGGACGCdTdT | 2030 | GCGUCCUUCUUCUUCUUGUdTdT | 2141 |
| 79 | 97 | AGAAGAAGAAGGACGCTGG | 1905 | AGAAGAAGAAGGACGCUGGdTdT | 2031 | CCAGCGUCCUUCUUCUUCUdTdT | 2142 |
| 83 | 101 | GAAGAAGGACGCTGGAAAG | 1906 | GAAGAAGGACGCUGGAAAGdTdT | 2032 | CUUUCCAGCGUCCUUCUUCdTdT | 2143 |
| 85 | 103 | AGAAGGACGCTGGAAAGTC | 1907 | AGAAGGACGCUGGAAAGUCdTdT | 2033 | GACUUUCCAGCGUCCUUCUdTdT | 2144 |
| 91 | 109 | ACGCTGGAAAGTCGGCCAA | 1908 | ACGCUGGAAAGUCGGCCAAdTdT | 2034 | UUGGCCGACUUUCCAGCGUdTdT | 2145 |
| 94 | 112 | CTGGAAAGTCGGCCAAGAA | 1909 | CUGGAAAGUCGGCCAAGAAdTdT | 2035 | UUCUUGGCCGACUUUCCAGdTdT | 2146 |
| 96 | 114 | GGAAAGTCGGCCAAGAAAG | 1910 | GGAAAGUCGGCCAAGAAAGdTdT | 2036 | CUUUCUUGGCCGACUUUCCdTdT | 2147 |
| 101 | 119 | GTCGGCCAAGAAAGACAAA | 1911 | GUCGGCCAAGAAAGACAAAdTdT | 2037 | UUUGUCUUUCUUGGCCGACdTdT | 2148 |
| 103 | 121 | CGGCCAAGAAAGACAAAGA | 2523 | CGGCCAAGAAAGACAAAGAdTdT | 2038 | UCUUUGUCUUUCUUGGCCGdTdT | 2149 |
| 107 | 125 | CAAGAAAGACAAAGACCCA | 2524 | CAAGAAAGACAAAGACCCAdTdT | 2039 | UGGGUCUUUGUCUUUCUUGdTdT | 2150 |
| 109 | 127 | AGAAAGACAAAGACCCAGT | 1912 | AGAAAGACAAAGACCCAGUdTdT | 950 | ACUGGGUCUUUGUCUUUCUdTdT | 1360 |
| 115 | 133 | ACAAAGACCCAGTGAACAA | 1913 | ACAAAGACCCAGUGAACAAdTdT | 2040 | UUGUUCACUGGGUCUUUGUdTdT | 2151 |
| 116 | 134 | CAAAGACCCAGTGAACAAA | 1914 | CAAAGACCCAGUGAACAAAdTdT | 2041 | UUUGUUCACUGGGUCUUUGdTdT | 2152 |
| 120 | 138 | GACCCAGTGAACAAATCCG | 1915 | GACCCAGUGAACAAAUCCGdTdT | 2042 | CGGAUUUGUUCACUGGGUCdTdT | 2153 |
| 125 | 143 | AGTGAACAAATCCGGGGGC | 1916 | AGUGAACAAAUCCGGGGGCdTdT | 2043 | GCCCCCGGAUUUGUUCACUdTdT | 2154 |
| 127 | 145 | TGAACAAATCCGGGGGCAA | 1917 | UGAACAAAUCCGGGGGCAAdTdT | 2044 | UUGCCCCCGGAUUUGUUCAdTdT | 2155 |
| 130 | 148 | ACAAATCCGGGGGCAAGGC | 1918 | ACAAAUCCGGGGGCAAGGCdTdT | 2045 | GCCUUGCCCCCGGAUUUGUdTdT | 2156 |
| 136 | 154 | CCGGGGGCAAGGCCAAAAA | 2525 | CCGGGGGCAAGGCCAAAAAdTdT | 2046 | UUUUUGGCCUUGCCCCCGGdTdT | 2157 |
| 140 | 158 | GGGCAAGGCCAAAAAGAAG | 2526 | GGGCAAGGCCAAAAAGAAGdTdT | 2047 | CUUCUUUUUGGCCUUGCCCdTdT | 2158 |
| 142 | 160 | GCAAGGCCAAAAAGAAGAA | 2527 | GCAAGGCCAAAAAGAAGAAdTdT | 2048 | UUCUUCUUUUUGGCCUUGCdTdT | 2159 |
| 146 | 164 | GGCCAAAAAGAAGAAGTGG | 1919 | GGCCAAAAAGAAGAAGUGGdTdT | 2049 | CCACUUCUUCUUUUUGGCCdTdT | 2160 |
| 148 | 166 | CCAAAAAGAAGAAGTGGTC | 1920 | CCAAAAAGAAGAAGUGGUCdTdT | 2050 | GACCACUUCUUCUUUUUGGdTdT | 2161 |
| 151 | 169 | AAAAGAAGAAGTGGTCCAA | 1921 | AAAAGAAGAAGUGGUCCAAdTdT | 2051 | UUGGACCACUUCUUCUUUUdTdT | 2162 |
| 154 | 172 | AGAAGAAGTGGTCCAAAGG | 1922 | AGAAGAAGUGGUCCAAAGGdTdT | 2052 | CCUUUGGACCACUUCUUCUdTdT | 2163 |
| 160 | 178 | AGTGGTCCAAAGGCAAAGT | 1923 | AGUGGUCCAAAGGCAAAGUdTdT | 982 | ACUUUGCCUUUGGACCACUdTdT | 1392 |
| 163 | 181 | GGTCCAAAGGCAAAGTTCG | 1924 | GGUCCAAAGGCAAAGUUCGdTdT | 2053 | CGAACUUUGCCUUUGGACCdTdT | 2164 |
| 165 | 183 | TCCAAAGGCAAAGTTCGGG | 1925 | UCCAAAGGCAAAGUUCGGGdTdT | 2054 | CCCGAACUUUGCCUUUGGAdTdT | 2165 |
| 169 | 187 | AAGGCAAAGTTCGGGACAA | 1926 | AAGGCAAAGUUCGGGACAAdTdT | 2055 | UUGUCCCGAACUUUGCCUUdTdT | 2166 |
| 173 | 191 | CAAAGTTCGGGACAAGCTC | 1927 | CAAAGUUCGGGACAAGCUCdTdT | 2056 | GAGCUUGUCCCGAACUUUGdTdT | 2167 |
| 178 | 196 | TTCGGGACAAGCTCAATAA | 1928 | UUCGGGACAAGCUCAAUAAdTdT | 2057 | UUAUUGAGCUUGUCCCGAAdTdT | 2168 |
| 181 | 199 | GGGACAAGCTCAATAACTT | 1929 | GGGACAAGCUCAAUAACUUdTdT | 1003 | AAGUUAUUGAGCUUGUCCCdTdT | 1413 |
| 182 | 200 | GGACAAGCTCAATAACTTA | 1930 | GGACAAGCUCAAUAACUUAdTdT | 2058 | UAAGUUAUUGAGCUUGUCCdTdT | 2169 |
| 188 | 206 | GCTCAATAACTTAGTCTTG | 1931 | GCUCAAUAACUUAGUCUUGdTdT | 2059 | CAAGACUAAGUUAUUGAGCdTdT | 2170 |
| 189 | 207 | CTCAATAACTTAGTCTTGT | 1932 | CUCAAUAACUUAGUCUUGUdTdT | 1011 | ACAAGACUAAGUUAUUGAGdTdT | 1421 |
| 192 | 210 | AATAACTTAGTCTTGTTTG | 1933 | AAUAACUUAGUCUUGUUUGdTdT | 2060 | CAAACAAGACUAAGUUAUUdTdT | 2171 |
| 197 | 215 | CTTAGTCTTGTTTGACAAA | 1934 | CUUAGUCUUGUUUGACAAAdTdT | 2061 | UUUGUCAAACAAGACUAAGdTdT | 2172 |
| 200 | 218 | AGTCTTGTTTGACAAAGCT | 1935 | AGUCUUGUUUGACAAAGCUdTdT | 1022 | AGCUUUGUCAAACAAGACUdTdT | 1432 |
| 203 | 221 | CTTGTTTGACAAAGCTACC | 1936 | CUUGUUUGACAAAGCUACCdTdT | 2062 | GGUAGCUUUGUCAAACAAGdTdT | 2173 |
| 206 | 224 | GTTTGACAAAGCTACCTAT | 1937 | GUUUGACAAAGCUACCUAUdTdT | 1028 | AUAGGUAGCUUUGUCAAACdTdT | 1438 |
| 212 | 230 | CAAAGCTACCTATGATAAA | 1938 | CAAAGCUACCUAUGAUAAAdTdT | 2063 | UUUAUCAUAGGUAGCUUUGdTdT | 2174 |
| 216 | 234 | GCTACCTATGATAAACTCT | 1939 | GCUACCUAUGAUAAACUCUdTdT | 1038 | AGAGUUUAUCAUAGGUAGCdTdT | 1448 |
| 217 | 235 | CTACCTATGATAAACTCTG | 1940 | CUACCUAUGAUAAACUCUGdTdT | 2064 | CAGAGUUUAUCAUAGGUAGdTdT | 2175 |
| 220 | 238 | CCTATGATAAACTCTGTAA | 1941 | CCUAUGAUAAACUCUGUAAdTdT | 2065 | UUACAGAGUUUAUCAUAGGdTdT | 2176 |
| 224 | 242 | TGATAAACTCTGTAAGGAA | 1942 | UGAUAAACUCUGUAAGGAAdTdT | 2066 | UUCCUUACAGAGUUUAUCAdTdT | 2177 |
| 229 | 247 | AACTCTGTAAGGAAGTTCC | 1943 | AACUCUGUAAGGAAGUUCCdTdT | 2067 | GGAACUUCCUUACAGAGUUdTdT | 2178 |
| 231 | 249 | CTCTGTAAGGAAGTTCCCA | 1944 | CUCUGUAAGGAAGUUCCCAdTdT | 2068 | UGGGAACUUCCUUACAGAGdTdT | 2179 |
| 236 | 254 | TAAGGAAGTTCCCAACTAT | 1945 | UAAGGAAGUUCCCAACUAUdTdT | 1058 | AUAGUUGGGAACUUCCUUAdTdT | 1468 |
| 239 | 257 | GGAAGTTCCCAACTATAAA | 1946 | GGAAGUUCCCAACUAUAAAdTdT | 2069 | UUUAUAGUUGGGAACUUCCdTdT | 2180 |
| 243 | 261 | GTTCCCAACTATAAACTTA | 1947 | GUUCCCAACUAUAAACUUAdTdT | 2070 | UAAGUUUAUAGUUGGGAACdTdT | 2181 |
| 245 | 263 | TCCCAACTATAAACTTATA | 1948 | UCCCAACUAUAAACUUAUAdTdT | 2071 | UAUAAGUUUAUAGUUGGGAdTdT | 2182 |
| 248 | 266 | CAACTATAAACTTATAACC | 1949 | CAACUAUAAACUUAUAACCdTdT | 2072 | GGUUAUAAGUUUAUAGUUGdTdT | 2183 |
| 254 | 272 | TAAACTTATAACCCCAGCT | 1950 | UAAACUUAUAACCCCAGCUdTdT | 2073 | AGCUGGGGUUAUAAGUUUAdTdT | 2184 |
| 255 | 273 | AAACTTATAACCCCAGCTG | 1951 | AAACUUAUAACCCCAGCUGdTdT | 2074 | CAGCUGGGGUUAUAAGUUUdTdT | 2185 |
| 258 | 276 | CTTATAACCCCAGCTGTGG | 1952 | CUUAUAACCCCAGCUGUGGdTdT | 2075 | CCACAGCUGGGGUUAUAAGdTdT | 2186 |
| 264 | 282 | ACCCCAGCTGTGGTCTCTG | 1953 | ACCCCAGCUGUGGUCUCUGdTdT | 2076 | CAGAGACCACAGCUGGGGUdTdT | 2187 |
| 267 | 285 | CCAGCTGTGGTCTCTGAGA | 1954 | CCAGCUGUGGUCUCUGAGAdTdT | 2077 | UCUCAGAGACCACAGCUGGdTdT | 2188 |
| 271 | 289 | CTGTGGTCTCTGAGAGACT | 1955 | CUGUGGUCUCUGAGAGACUdTdT | 1077 | AGUCUCUCAGAGACCACAGdTdT | 1487 |
| 274 | 292 | TGGTCTCTGAGAGACTGAA | 1956 | UGGUCUCUGAGAGACUGAAdTdT | 2078 | UUCAGUCUCUCAGAGACCAdTdT | 2189 |
| 278 | 296 | CTCTGAGAGACTGAAGATT | 1957 | CUCUGAGAGACUGAAGAUUdTdT | 1084 | AAUCUUCAGUCUCUCAGAGdTdT | 1494 |
| 279 | 297 | TCTGAGAGACTGAAGATTC | 1958 | UCUGAGAGACUGAAGAUUCdTdT | 2079 | GAAUCUUCAGUCUCUCAGAdTdT | 2190 |
| 282 | 300 | GAGAGACTGAAGATTCGAG | 1959 | GAGAGACUGAAGAUUCGAGdTdT | 2080 | CUCGAAUCUUCAGUCUCUCdTdT | 2191 |
| 287 | 305 | ACTGAAGATTCGAGGCTCC | 1960 | ACUGAAGAUUCGAGGCUCCdTdT | 2081 | GGAGCCUCGAAUCUUCAGUdTdT | 2192 |
| 289 | 307 | TGAAGATTCGAGGCTCCCT | 1961 | UGAAGAUUCGAGGCUCCCUdTdT | 1095 | AGGGAGCCUCGAAUCUUCAdTdT | 1505 |
| 293 | 311 | GATTCGAGGCTCCCTGGCC | 1962 | GAUUCGAGGCUCCCUGGCCdTdT | 2082 | GGCCAGGGAGCCUCGAAUCdTdT | 2193 |
| 298 | 316 | GAGGCTCCCTGGCCAGGGC | 1963 | GAGGCUCCCUGGCCAGGGCdTdT | 2083 | GCCCUGGCCAGGGAGCCUCdTdT | 2194 |
| 302 | 320 | CTCCCTGGCCAGGGCAGCC | 1964 | CUCCCUGGCCAGGGCAGCCdTdT | 2084 | GGCUGCCCUGGCCAGGGAGdTdT | 2195 |
| 306 | 324 | CTGGCCAGGGCAGCCCTTC | 1965 | CUGGCCAGGGCAGCCCUUCdTdT | 2085 | GAAGGGCUGCCCUGGCCAGdTdT | 2196 |
| 308 | 326 | GGCCAGGGCAGCCCTTCAG | 1966 | GGCCAGGGCAGCCCUUCAGdTdT | 2086 | CUGAAGGGCUGCCCUGGCCdTdT | 2197 |
| 313 | 331 | GGGCAGCCCTTCAGGAGCT | 1967 | GGGCAGCCCUUCAGGAGCUdTdT | 1110 | AGCUCCUGAAGGGCUGCCCdTdT | 1520 |
| 316 | 334 | CAGCCCTTCAGGAGCTCCT | 1968 | CAGCCCUUCAGGAGCUCCUdTdT | 1113 | AGGAGCUCCUGAAGGGCUGdTdT | 1523 |
| 318 | 336 | GCCCTTCAGGAGCTCCTTA | 1969 | GCCCUUCAGGAGCUCCUUAdTdT | 2087 | UAAGGAGCUCCUGAAGGGCdTdT | 2198 |
| 323 | 341 | TCAGGAGCTCCTTAGTAAA | 1970 | UCAGGAGCUCCUUAGUAAAdTdT | 2088 | UUUACUAAGGAGCUCCUGAdTdT | 2199 |
| 326 | 344 | GGAGCTCCTTAGTAAAGGA | 1971 | GGAGCUCCUUAGUAAAGGAdTdT | 2089 | UCCUUUACUAAGGAGCUCCdTdT | 2200 |
| 330 | 348 | CTCCTTAGTAAAGGACTTA | 1972 | CUCCUUAGUAAAGGACUUAdTdT | 2090 | UAAGUCCUUUACUAAGGAGdTdT | 2201 |
| 333 | 351 | CTTAGTAAAGGACTTATCA | 1973 | CUUAGUAAAGGACUUAUCAdTdT | 2091 | UGAUAAGUCCUUUACUAAGdTdT | 2202 |
| 335 | 353 | TAGTAAAGGACTTATCAAA | 1974 | UAGUAAAGGACUUAUCAAAdTdT | 2092 | UUUGAUAAGUCCUUUACUAdTdT | 2203 |
| 340 | 358 | AAGGACTTATCAAACTGGT | 1975 | AAGGACUUAUCAAACUGGUdTdT | 1137 | ACCAGUUUGAUAAGUCCUUdTdT | 1547 |
| 343 | 361 | GACTTATCAAACTGGTTTC | 1976 | GACUUAUCAAACUGGUUUCdTdT | 2093 | GAAACCAGUUUGAUAAGUCdTdT | 2204 |
| 345 | 363 | CTTATCAAACTGGTTTCAA | 1977 | CUUAUCAAACUGGUUUCAAdTdT | 2094 | UUGAAACCAGUUUGAUAAGdTdT | 2205 |
| 348 | 366 | ATCAAACTGGTTTCAAAGC | 1978 | AUCAAACUGGUUUCAAAGCdTdT | 2095 | GCUUUGAAACCAGUUUGAUdTdT | 2206 |
| 353 | 371 | ACTGGTTTCAAAGCACAGA | 1979 | ACUGGUUUCAAAGCACAGAdTdT | 2096 | UCUGUGCUUUGAAACCAGUdTdT | 2207 |
| 358 | 376 | TTTCAAAGCACAGAGCTCA | 1980 | UUUCAAAGCACAGAGCUCAdTdT | 2097 | UGAGCUCUGUGCUUUGAAAdTdT | 2208 |
| 359 | 377 | TTCAAAGCACAGAGCTCAA | 1981 | UUCAAAGCACAGAGCUCAAdTdT | 2098 | UUGAGCUCUGUGCUUUGAAdTdT | 2209 |
| 365 | 383 | GCACAGAGCTCAAGTAATT | 1982 | GCACAGAGCUCAAGUAAUUdTdT | 1162 | AAUUACUUGAGCUCUGUGCdTdT | 1572 |
| 368 | 386 | CAGAGCTCAAGTAATTTAC | 1983 | CAGAGCUCAAGUAAUUUACdTdT | 2099 | GUAAAUUACUUGAGCUCUGdTdT | 2210 |
| 369 | 387 | AGAGCTCAAGTAATTTACA | 1984 | AGAGCUCAAGUAAUUUACAdTdT | 2100 | UGUAAAUUACUUGAGCUCUdTdT | 2211 |
| 373 | 391 | CTCAAGTAATTTACACCAG | 1985 | CUCAAGUAAUUUACACCAGdTdT | 2101 | CUGGUGUAAAUUACUUGAGdTdT | 2212 |
| 378 | 396 | GTAATTTACACCAGAAATA | 1986 | GUAAUUUACACCAGAAAUAdTdT | 2102 | UAUUUCUGGUGUAAAUUACdTdT | 2213 |
| 379 | 397 | TAATTTACACCAGAAATAC | 1987 | UAAUUUACACCAGAAAUACdTdT | 2103 | GUAUUUCUGGUGUAAAUUAdTdT | 2214 |
| 384 | 402 | TACACCAGAAATACCAAGG | 1988 | UACACCAGAAAUACCAAGGdTdT | 2104 | CCUUGGUAUUUCUGGUGUAdTdT | 2215 |
| 387 | 405 | ACCAGAAATACCAAGGGTG | 1989 | ACCAGAAAUACCAAGGGUGdTdT | 2105 | CACCCUUGGUAUUUCUGGUdTdT | 2216 |
| 390 | 408 | AGAAATACCAAGGGTGGAG | 1990 | AGAAAUACCAAGGGUGGAGdTdT | 2106 | CUCCACCCUUGGUAUUUCUdTdT | 2217 |
| 393 | 411 | AATACCAAGGGTGGAGATG | 1991 | AAUACCAAGGGUGGAGAUGdTdT | 2107 | CAUCUCCACCCUUGGUAUUdTdT | 2218 |
| 399 | 417 | AAGGGTGGAGATGCTCCAG | 1992 | AAGGGUGGAGAUGCUCCAGdTdT | 2108 | CUGGAGCAUCUCCACCCUUdTdT | 2219 |
| 402 | 420 | GGTGGAGATGCTCCAGCTG | 1993 | GGUGGAGAUGCUCCAGCUGdTdT | 2109 | CAGCUGGAGCAUCUCCACCdTdT | 2220 |
| 404 | 422 | TGGAGATGCTCCAGCTGCT | 1994 | UGGAGAUGCUCCAGCUGCUdTdT | 1201 | AGCAGCUGGAGCAUCUCCAdTdT | 1611 |
| 410 | 428 | TGCTCCAGCTGCTGGTGAA | 1995 | UGCUCCAGCUGCUGGUGAAdTdT | 2110 | UUCACCAGCAGCUGGAGCAdTdT | 2221 |
| 411 | 429 | GCTCCAGCTGCTGGTGAAG | 1996 | GCUCCAGCUGCUGGUGAAGdTdT | 2111 | CUUCACCAGCAGCUGGAGCdTdT | 2222 |
| 417 | 435 | GCTGCTGGTGAAGATGCAT | 1997 | GCUGCUGGUGAAGAUGCAUdTdT | 1214 | AUGCAUCUUCACCAGCAGCdTdT | 1624 |
| 419 | 437 | TGCTGGTGAAGATGCATGA | 1998 | UGCUGGUGAAGAUGCAUGAdTdT | 2112 | UCAUGCAUCUUCACCAGCAdTdT | 2223 |
| 423 | 441 | GGTGAAGATGCATGAATAG | 1999 | GGUGAAGAUGCAUGAAUAGdTdT | 2113 | CUAUUCAUGCAUCUUCACCdTdT | 2224 |
| 426 | 444 | GAAGATGCATGAATAGGTC | 2000 | GAAGAUGCAUGAAUAGGUCdTdT | 2114 | GACCUAUUCAUGCAUCUUCdTdT | 2225 |
| 430 | 448 | ATGCATGAATAGGTCCAAC | 2001 | AUGCAUGAAUAGGUCCAACdTdT | 2115 | GUUGGACCUAUUCAUGCAUdTdT | 2226 |
| 432 | 450 | GCATGAATAGGTCCAACCA | 2002 | GCAUGAAUAGGUCCAACCAdTdT | 2116 | UGGUUGGACCUAUUCAUGCdTdT | 2227 |
| 435 | 453 | TGAATAGGTCCAACCAGCT | 2003 | UGAAUAGGUCCAACCAGCUdTdT | 1232 | AGCUGGUUGGACCUAUUCAdTdT | 1642 |
| 441 | 459 | GGTCCAACCAGCTGTACAT | 2004 | GGUCCAACCAGCUGUACAUdTdT | 1238 | AUGUACAGCUGGUUGGACCdTdT | 1648 |
| 444 | 462 | CCAACCAGCTGTACATTTG | 2005 | CCAACCAGCUGUACAUUUGdTdT | 2117 | CAAAUGUACAGCUGGUUGGdTdT | 2228 |
| 448 | 466 | CCAGCTGTACATTTGGAAA | 2006 | CCAGCUGUACAUUUGGAAAdTdT | 2118 | UUUCCAAAUGUACAGCUGGdTdT | 2229 |
| 451 | 469 | GCTGTACATTTGGAAAAAT | 2007 | GCUGUACAUUUGGAAAAAUdTdT | 1248 | AUUUUUCCAAAUGUACAGCdTdT | 1658 |
| 454 | 472 | GTACATTTGGAAAAATAAA | 2008 | GUACAUUUGGAAAAAUAAAdTdT | 2119 | UUUAUUUUUCCAAAUGUACdTdT | 2230 |
| 456 | 474 | ACATTTGGAAAAATAAAAC | 2009 | ACAUUUGGAAAAAUAAAACdTdT | 2120 | GUUUUAUUUUUCCAAAUGUdTdT | 2231 |
| 462 | 480 | GGAAAAATAAAACTTTATT | 2010 | GGAAAAAUAAAACUUUAUUdTdT | 2121 | AAUAAAGUUUUAUUUUUCCdTdT | 2232 |
| 465 | 483 | AAAATAAAACTTTATTAAA | 2011 | AAAAUAAAACUUUAUUAAAdTdT | 2122 | UUUAAUAAAGUUUUAUUUUdTdT | 2233 |

TABLE 10
RPS25 Unmodified duplex Sequences

| Start | End | Sense | SEQ | Antisense | SEQ | | SEQ |
|---|---|---|---|---|---|---|---|
| Site in | Site in | Oligo Sequence | ID | Oligo Sequence | ID | Target Sequence | ID |
| NM_001028.3 | NM_00128.3 | 5′ to 3′ | NO: | 5′ to 3′ | NO: | 5′ to 3′ | NO: |
| 245 | 263 | UCCCAACUAUAAACUUAUA | 1722 | UAUAAGUUUAUAGUUGGGA | 1833 | TCCCAACTATAAACTTATA | 1948 |
| 246 | 264 | CCCAACUAUAAACUUAUAA | 2234 | UUAUAAGUUUAUAGUUGGG | 2287 | CCCAACTATAAACTTATAA | 2340 |
| 188 | 206 | GCUCAAUAACUUAGUCUUG | 1710 | CAAGACUAAGUUAUUGAGC | 1821 | GCTCAATAACTTAGTCTTG | 1931 |
| 343 | 361 | GACUUAUCAAACUGGUUUC | 1744 | GAAACCAGUUUGAUAAGUC | 1855 | GACTTATCAAACTGGTTTC | 1976 |
| 244 | 262 | UUCCCAACUAUAAACUUAU | 246 | AUAAGUUUAUAGUUGGGAA | 656 | TTCCCAACTATAAACTTAT | 2341 |
| 189 | 207 | CUCAAUAACUUAGUCUUGU | 191 | ACAAGACUAAGUUAUUGAG | 601 | CTCAATAACTTAGTCTTGT | 1932 |
| 247 | 265 | CCAACUAUAAACUUAUAAC | 2235 | GUUAUAAGUUUAUAGUUGG | 2288 | CCAACTATAAACTTATAAC | 2342 |
| 182 | 200 | GGACAAGCUCAAUAACUUA | 1709 | UAAGUUAUUGAGCUUGUCC | 1820 | GGACAAGCTCAATAACTTA | 1930 |
| 181 | 199 | GGGACAAGCUCAAUAACUU | 183 | AAGUUAUUGAGCUUGUCCC | 593 | GGGACAAGCTCAATAACTT | 1929 |
| 248 | 266 | CAACUAUAAACUUAUAACC | 1723 | GGUUAUAAGUUUAUAGUUG | 1834 | CAACTATAAACTTATAACC | 1949 |
| 243 | 261 | GUUCCCAACUAUAAACUUA | 1721 | UAAGUUUAUAGUUGGGAAC | 1832 | GTTCCCAACTATAAACTTA | 1947 |
| 187 | 205 | AGCUCAAUAACUUAGUCUU | 189 | AAGACUAAGUUAUUGAGCU | 599 | AGCTCAATAACTTAGTCTT | 2343 |
| 368 | 386 | CAGAGCUCAAGUAAUUUAC | 1750 | GUAAAUUACUUGAGCUCUG | 1861 | CAGAGCTCAAGTAATTTAC | 1983 |
| 344 | 362 | ACUUAUCAAACUGGUUUCA | 2236 | UGAAACCAGUUUGAUAAGU | 2289 | ACTTATCAAACTGGTTTCA | 2344 |
| 330 | 348 | CUCCUUAGUAAAGGACUUA | 1741 | UAAGUCCUUUACUAAGGAG | 1852 | CTCCTTAGTAAAGGACTTA | 1972 |
| 342 | 360 | GGACUUAUCAAACUGGUUU | 319 | AAACCAGUUUGAUAAGUCC | 729 | GGACTTATCAAACTGGTTT | 2345 |
| 345 | 363 | CUUAUCAAACUGGUUUCAA | 1745 | UUGAAACCAGUUUGAUAAG | 1856 | CTTATCAAACTGGTTTCAA | 1977 |
| 369 | 387 | AGAGCUCAAGUAAUUUACA | 1751 | UGUAAAUUACUUGAGCUCU | 1862 | AGAGCTCAAGTAATTTACA | 1984 |
| 454 | 472 | GUACAUUUGGAAAAAUAAA | 1770 | UUUAUUUUUCCAAAUGUAC | 1881 | GTACATTTGGAAAAATAAA | 2008 |
| 378 | 396 | GUAAUUUACACCAGAAAUA | 1753 | UAUUUCUGGUGUAAAUUAC | 1864 | GTAATTTACACCAGAAATA | 1986 |
| 242 | 260 | AGUUCCCAACUAUAAACUU | 244 | AAGUUUAUAGUUGGGAACU | 654 | AGTTCCCAACTATAAACTT | 2346 |
| 346 | 364 | UUAUCAAACUGGUUUCAAA | 2237 | UUUGAAACCAGUUUGAUAA | 2290 | TTATCAAACTGGTTTCAAA | 2347 |
| 347 | 365 | UAUCAAACUGGUUUCAAAG | 2238 | CUUUGAAACCAGUUUGAUA | 2291 | TATCAAACTGGTTTCAAAG | 2348 |
| 451 | 469 | GCUGUACAUUUGGAAAAAU | 428 | AUUUUUCCAAAUGUACAGC | 838 | GCTGTACATTTGGAAAAAT | 2007 |
| 333 | 351 | CUUAGUAAAGGACUUAUCA | 1742 | UGAUAAGUCCUUUACUAAG | 1853 | CTTAGTAAAGGACTTATCA | 1973 |
| 377 | 395 | AGUAAUUUACACCAGAAAU | 354 | AUUUCUGGUGUAAAUUACU | 764 | AGTAATTTACACCAGAAAT | 2349 |
| 452 | 470 | CUGUACAUUUGGAAAAAUA | 2239 | UAUUUUUCCAAAUGUACAG | 2292 | CTGTACATTTGGAAAAATA | 2350 |
| 183 | 201 | GACAAGCUCAAUAACUUAG | 2240 | CUAAGUUAUUGAGCUUGUC | 2293 | GACAAGCTCAATAACTTAG | 2351 |
| 239 | 257 | GGAAGUUCCCAACUAUAAA | 1720 | UUUAUAGUUGGGAACUUCC | 1831 | GGAAGTTCCCAACTATAAA | 1946 |
| 372 | 390 | GCUCAAGUAAUUUACACCA | 2241 | UGGUGUAAAUUACUUGAGC | 2294 | GCTCAAGTAATTTACACCA | 2352 |
| 217 | 235 | CUACCUAUGAUAAACUCUG | 1715 | CAGAGUUUAUCAUAGGUAG | 1826 | CTACCTATGATAAACTCTG | 1940 |
| 448 | 466 | CCAGCUGUACAUUUGGAAA | 1769 | UUUCCAAAUGUACAGCUGG | 1880 | CCAGCTGTACATTTGGAAA | 2006 |
| 329 | 347 | GCUCCUUAGUAAAGGACUU | 306 | AAGUCCUUUACUAAGGAGC | 716 | GCTCCTTAGTAAAGGACTT | 2353 |
| 331 | 349 | UCCUUAGUAAAGGACUUAU | 308 | AUAAGUCCUUUACUAAGGA | 718 | TCCTTAGTAAAGGACTTAT | 2354 |
| 31 | 49 | GUGUCUGCUGCUAUUCUCC | 1669 | GGAGAAUAGCAGCAGACAC | 1780 | GTGTCTGCTGCTATTCTCC | 1894 |
| 179 | 197 | UCGGGACAAGCUCAAUAAC | 2242 | GUUAUUGAGCUUGUCCCGA | 2295 | TCGGGACAAGCTCAATAAC | 2355 |
| 6 | 24 | UGUCCGACAUCUUGACGAG | 1665 | CUCGUCAAGAUGUCGGACA | 1776 | TGTCCGACATCTTGACGAG | 1887 |
| 220 | 238 | CCUAUGAUAAACUCUGUAA | 1716 | UUACAGAGUUUAUCAUAGG | 1827 | CCTATGATAAACTCTGTAA | 1941 |
| 376 | 394 | AAGUAAUUUACACCAGAAA | 2243 | UUUCUGGUGUAAAUUACUU | 2296 | AAGTAATTTACACCAGAAA | 2356 |
| 453 | 471 | UGUACAUUUGGAAAAAUAA | 2244 | UUAUUUUUCCAAAUGUACA | 2297 | TGTACATTTGGAAAAATAA | 2357 |
| 332 | 350 | CCUUAGUAAAGGACUUAUC | 2245 | GAUAAGUCCUUUACUAAGG | 2298 | CCTTAGTAAAGGACTTATC | 2358 |
| 449 | 467 | CAGCUGUACAUUUGGAAAA | 2246 | UUUUCCAAAUGUACAGCUG | 2299 | CAGCTGTACATTTGGAAAA | 2359 |
| 278 | 296 | CUCUGAGAGACUGAAGAUU | 264 | AAUCUUCAGUCUCUCAGAG | 674 | CTCTGAGAGACTGAAGATT | 1957 |
| 279 | 297 | UCUGAGAGACUGAAGAUUC | 1730 | GAAUCUUCAGUCUCUCAGA | 1841 | TCTGAGAGACTGAAGATTC | 1958 |
| 276 | 294 | GUCUCUGAGAGACUGAAGA | 2247 | UCUUCAGUCUCUCAGAGAC | 2300 | GTCTCTGAGAGACTGAAGA | 2360 |
| 370 | 388 | GAGCUCAAGUAAUUUACAC | 2248 | GUGUAAAUUACUUGAGCUC | 2301 | GAGCTCAAGTAATTTACAC | 2361 |
| 229 | 247 | AACUCUGUAAGGAAGUUCC | 1718 | GGAACUUCCUUACAGAGUU | 1829 | AACTCTGTAAGGAAGTTCC | 1943 |
| 185 | 203 | CAAGCUCAAUAACUUAGUC | 2249 | GACUAAGUUAUUGAGCUUG | 2302 | CAAGCTCAATAACTTAGTC | 2362 |
| 221 | 239 | CUAUGAUAAACUCUGUAAG | 2250 | CUUACAGAGUUUAUCAUAG | 2303 | CTATGATAAACTCTGTAAG | 2363 |
| 33 | 51 | GUCUGCUGCUAUUCUCCGA | 1670 | UCGGAGAAUAGCAGCAGAC | 1781 | GTCTGCTGCTATTCTCCGA | 1895 |
| 163 | 181 | GGUCCAAAGGCAAAGUUCG | 1704 | CGAACUUUGCCUUUGGACC | 1815 | GGTCCAAAGGCAAAGTTCG | 1924 |
| 373 | 391 | CUCAAGUAAUUUACACCAG | 1752 | CUGGUGUAAAUUACUUGAG | 1863 | CTCAAGTAATTTACACCAG | 1985 |
| 375 | 393 | CAAGUAAUUUACACCAGAA | 2251 | UUCUGGUGUAAAUUACUUG | 2304 | CAAGTAATTTACACCAGAA | 2364 |
| 450 | 468 | AGCUGUACAUUUGGAAAAA | 2252 | UUUUUCCAAAUGUACAGCU | 2305 | AGCTGTACATTTGGAAAAA | 2365 |
| 180 | 198 | CGGGACAAGCUCAAUAACU | 182 | AGUUAUUGAGCUUGUCCCG | 592 | CGGGACAAGCTCAATAACT | 2366 |
| 190 | 208 | UCAAUAACUUAGUCUUGUU | 192 | AACAAGACUAAGUUAUUGA | 602 | TCAATAACTTAGTCTTGTT | 2367 |
| 203 | 221 | CUUGUUUGACAAAGCUACC | 1713 | GGUAGCUUUGUCAAACAAG | 1824 | CTTGTTTGACAAAGCTACC | 1936 |
| 462 | 480 | GGAAAAAUAAAACUUUAUU | 1772 | AAUAAAGUUUUAUUUUUCC | 1883 | GGAAAAATAAAACTTTATT | 2010 |
| 231 | 249 | CUCUGUAAGGAAGUUCCCA | 1719 | UGGGAACUUCCUUACAGAG | 1830 | CTCTGTAAGGAAGTTCCCA | 1944 |
| 30 | 48 | GGUGUCUGCUGCUAUUCUC | 2253 | GAGAAUAGCAGCAGACACC | 2306 | GGTGTCTGCTGCTATTCTC | 2368 |
| 200 | 218 | AGUCUUGUUUGACAAAGCU | 202 | AGCUUUGUCAAACAAGACU | 612 | AGTCTTGTTTGACAAAGCT | 1935 |
| 216 | 234 | GCUACCUAUGAUAAACUCU | 218 | AGAGUUUAUCAUAGGUAGC | 628 | GCTACCTATGATAAACTCT | 1939 |
| 341 | 359 | AGGACUUAUCAAACUGGUU | 318 | AACCAGUUUGAUAAGUCCU | 728 | AGGACTTATCAAACTGGTT | 2369 |
| 218 | 236 | UACCUAUGAUAAACUCUGU | 220 | ACAGAGUUUAUCAUAGGUA | 630 | TACCTATGATAAACTCTGT | 2370 |
| 461 | 479 | UGGAAAAAUAAAACUUUAU | 2254 | AUAAAGUUUUAUUUUUCCA | 2307 | TGGAAAAATAAAACTTTAT | 2371 |
| 162 | 180 | UGGUCCAAAGGCAAAGUUC | 2255 | GAACUUUGCCUUUGGACCA | 2308 | TGGTCCAAAGGCAAAGTTC | 2372 |
| 379 | 397 | UAAUUUACACCAGAAAUAC | 1754 | GUAUUUCUGGUGUAAAUUA | 1865 | TAATTTACACCAGAAATAC | 1987 |
| 280 | 298 | CUGAGAGACUGAAGAUUCG | 2256 | CGAAUCUUCAGUCUCUCAG | 2309 | CTGAGAGACTGAAGATTCG | 2373 |
| 191 | 209 | CAAUAACUUAGUCUUGUUU | 193 | AAACAAGACUAAGUUAUUG | 603 | CAATAACTTAGTCTTGTTT | 2374 |
| 212 | 230 | CAAAGCUACCUAUGAUAAA | 1714 | UUUAUCAUAGGUAGCUUUG | 1825 | CAAAGCTACCTATGATAAA | 1938 |
| 367 | 385 | ACAGAGCUCAAGUAAUUUA | 2257 | UAAAUUACUUGAGCUCUGU | 2310 | ACAGAGCTCAAGTAATTTA | 2375 |
| 230 | 248 | ACUCUGUAAGGAAGUUCCC | 2258 | GGGAACUUCCUUACAGAGU | 2311 | ACTCTGTAAGGAAGTTCCC | 2376 |
| 274 | 292 | UGGUCUCUGAGAGACUGAA | 1729 | UUCAGUCUCUCAGAGACCA | 1840 | TGGTCTCTGAGAGACTGAA | 1956 |
| 366 | 384 | CACAGAGCUCAAGUAAUUU | 343 | AAAUUACUUGAGCUCUGUG | 753 | CACAGAGCTCAAGTAATTT | 2377 |
| 371 | 389 | AGCUCAAGUAAUUUACACC | 2259 | GGUGUAAAUUACUUGAGCU | 2312 | AGCTCAAGTAATTTACACC | 2378 |
| 447 | 465 | ACCAGCUGUACAUUUGGAA | 2260 | UUCCAAAUGUACAGCUGGU | 2313 | ACCAGCTGTACATTTGGAA | 2379 |
| 223 | 241 | AUGAUAAACUCUGUAAGGA | 2261 | UCCUUACAGAGUUUAUCAU | 2314 | ATGATAAACTCTGTAAGGA | 2380 |
| 460 | 478 | UUGGAAAAAUAAAACUUUA | 2262 | UAAAGUUUUAUUUUUCCAA | 2315 | TTGGAAAAATAAAACTTTA | 2381 |
| 184 | 202 | ACAAGCUCAAUAACUUAGU | 186 | ACUAAGUUAUUGAGCUUGU | 596 | ACAAGCTCAATAACTTAGT | 2382 |
| 277 | 295 | UCUCUGAGAGACUGAAGAU | 263 | AUCUUCAGUCUCUCAGAGA | 673 | TCTCTGAGAGACTGAAGAT | 2383 |
| 232 | 250 | UCUGUAAGGAAGUUCCCAA | 2263 | UUGGGAACUUCCUUACAGA | 2316 | TCTGTAAGGAAGTTCCCAA | 2384 |
| 64 | 82 | CGCCUAAGGACGACAAGAA | 1678 | UUCUUGUCGUCCUUAGGCG | 1789 | CGCCTAAGGACGACAAGAA | 1904 |
| 282 | 300 | GAGAGACUGAAGAUUCGAG | 1731 | CUCGAAUCUUCAGUCUCUC | 1842 | GAGAGACTGAAGATTCGAG | 1959 |
| 224 | 242 | UGAUAAACUCUGUAAGGAA | 1717 | UUCCUUACAGAGUUUAUCA | 1828 | TGATAAACTCTGTAAGGAA | 1942 |
| 222 | 240 | UAUGAUAAACUCUGUAAGG | 2264 | CCUUACAGAGUUUAUCAUA | 2317 | TATGATAAACTCTGTAAGG | 2385 |
| 238 | 256 | AGGAAGUUCCCAACUAUAA | 2265 | UUAUAGUUGGGAACUUCCU | 2318 | AGGAAGTTCCCAACTATAA | 2386 |
| 254 | 272 | UAAACUUAUAACCCCAGCU | 1724 | AGCUGGGGUUAUAAGUUUA | 1835 | TAAACTTATAACCCCAGCT | 1950 |
| 275 | 293 | GGUCUCUGAGAGACUGAAG | 2266 | CUUCAGUCUCUCAGAGACC | 2319 | GGTCTCTGAGAGACTGAAG | 2387 |
| 219 | 237 | ACCUAUGAUAAACUCUGUA | 2267 | UACAGAGUUUAUCAUAGGU | 2320 | ACCTATGATAAACTCTGTA | 2388 |
| 186 | 204 | AAGCUCAAUAACUUAGUCU | 188 | AGACUAAGUUAUUGAGCUU | 598 | AAGCTCAATAACTTAGTCT | 2389 |
| 455 | 473 | UACAUUUGGAAAAAUAAAA | 2268 | UUUUAUUUUUCCAAAUGUA | 2321 | TACATTTGGAAAAATAAAA | 2390 |
| 197 | 215 | CUUAGUCUUGUUUGACAAA | 1712 | UUUGUCAAACAAGACUAAG | 1823 | CTTAGTCTTGTTTGACAAA | 1934 |
| 29 | 47 | CGGUGUCUGCUGCUAUUCU | 51 | AGAAUAGCAGCAGACACCG | 461 | CGGTGTCTGCTGCTATTCT | 1893 |
| 456 | 474 | ACAUUUGGAAAAAUAAAAC | 1771 | GUUUUAUUUUUCCAAAUGU | 1882 | ACATTTGGAAAAATAAAAC | 2009 |
| 34 | 52 | UCUGCUGCUAUUCUCCGAG | 2269 | CUCGGAGAAUAGCAGCAGA | 2322 | TCTGCTGCTATTCTCCGAG | 2391 |
| 423 | 441 | GGUGAAGAUGCAUGAAUAG | 1764 | CUAUUCAUGCAUCUUCACC | 1875 | GGTGAAGATGCATGAATAG | 1999 |
| 1 | 19 | CUUUUUGUCCGACAUCUUG | 1663 | CAAGAUGUCGGACAAAAAG | 1774 | CTTTTTGTCCGACATCTTG | 1885 |
| 348 | 366 | AUCAAACUGGUUUCAAAGC | 1746 | GCUUUGAAACCAGUUUGAU | 1857 | ATCAAACTGGTTTCAAAGC | 1978 |
| 240 | 258 | GAAGUUCCCAACUAUAAAC | 2270 | GUUUAUAGUUGGGAACUUC | 2323 | GAAGTTCCCAACTATAAAC | 2392 |
| 255 | 273 | AAACUUAUAACCCCAGCUG | 1725 | CAGCUGGGGUUAUAAGUUU | 1836 | AAACTTATAACCCCAGCTG | 1951 |
| 215 | 233 | AGCUACCUAUGAUAAACUC | 2271 | GAGUUUAUCAUAGGUAGCU | 2324 | AGCTACCTATGATAAACTC | 2393 |
| 382 | 400 | UUUACACCAGAAAUACCAA | 2272 | UUGGUAUUUCUGGUGUAAA | 2325 | TTTACACCAGAAATACCAA | 2394 |
| 353 | 371 | ACUGGUUUCAAAGCACAGA | 1747 | UCUGUGCUUUGAAACCAGU | 1858 | ACTGGTTTCAAAGCACAGA | 1979 |
| 326 | 344 | GGAGCUCCUUAGUAAAGGA | 1740 | UCCUUUACUAAGGAGCUCC | 1851 | GGAGCTCCTTAGTAAAGGA | 1971 |
| 202 | 220 | UCUUGUUUGACAAAGCUAC | 2273 | GUAGCUUUGUCAAACAAGA | 2326 | TCTTGTTTGACAAAGCTAC | 2395 |
| 45 | 63 | UCUCCGAGCUUCGCAAUGC | 1672 | GCAUUGCGAAGCUCGGAGA | 1783 | TCTCCGAGCTTCGCAATGC | 1898 |
| 419 | 437 | UGCUGGUGAAGAUGCAUGA | 1763 | UCAUGCAUCUUCACCAGCA | 1874 | TGCTGGTGAAGATGCATGA | 1998 |
| 178 | 196 | UUCGGGACAAGCUCAAUAA | 1708 | UUAUUGAGCUUGUCCCGAA | 1819 | TTCGGGACAAGCTCAATAA | 1928 |
| 44 | 62 | UUCUCCGAGCUUCGCAAUG | 2274 | CAUUGCGAAGCUCGGAGAA | 2327 | TTCTCCGAGCTTCGCAATG | 2396 |
| 335 | 353 | UAGUAAAGGACUUAUCAAA | 1743 | UUUGAUAAGUCCUUUACUA | 1854 | TAGTAAAGGACTTATCAAA | 1974 |
| 251 | 269 | CUAUAAACUUAUAACCCCA | 2275 | UGGGGUUAUAAGUUUAUAG | 2328 | CTATAAACTTATAACCCCA | 2397 |
| 374 | 392 | UCAAGUAAUUUACACCAGA | 2276 | UCUGGUGUAAAUUACUUGA | 2329 | TCAAGTAATTTACACCAGA | 2398 |
| 151 | 169 | AAAAGAAGAAGUGGUCCAA | 1702 | UUGGACCACUUCUUCUUUU | 1813 | AAAAGAAGAAGTGGTCCAA | 1921 |
| 164 | 182 | GUCCAAAGGCAAAGUUCGG | 2277 | CCGAACUUUGCCUUUGGAC | 2330 | GTCCAAAGGCAAAGTTCGG | 2399 |
| 253 | 271 | AUAAACUUAUAACCCCAGC | 2278 | GCUGGGGUUAUAAGUUUAU | 2331 | ATAAACTTATAACCCCAGC | 2400 |
| 32 | 50 | UGUCUGCUGCUAUUCUCCG | 2279 | CGGAGAAUAGCAGCAGACA | 2332 | TGTCTGCTGCTATTCTCCG | 2401 |
| 146 | 164 | GGCCAAAAAGAAGAAGUGG | 1700 | CCACUUCUUCUUUUUGGCC | 1811 | GGCCAAAAAGAAGAAGTGG | 1919 |
| 323 | 341 | UCAGGAGCUCCUUAGUAAA | 1739 | UUUACUAAGGAGCUCCUGA | 1850 | TCAGGAGCTCCTTAGTAAA | 1970 |
| 358 | 376 | UUUCAAAGCACAGAGCUCA | 1748 | UGAGCUCUGUGCUUUGAAA | 1859 | TTTCAAAGCACAGAGCTCA | 1980 |
| 241 | 259 | AAGUUCCCAACUAUAAACU | 243 | AGUUUAUAGUUGGGAACUU | 653 | AAGTTCCCAACTATAAACT | 2402 |
| 206 | 224 | GUUUGACAAAGCUACCUAU | 208 | AUAGGUAGCUUUGUCAAAC | 618 | GTTTGACAAAGCTACCTAT | 1937 |
| 328 | 346 | AGCUCCUUAGUAAAGGACU | 305 | AGUCCUUUACUAAGGAGCU | 715 | AGCTCCTTAGTAAAGGACT | 2403 |
| 213 | 231 | AAAGCUACCUAUGAUAAAC | 2280 | GUUUAUCAUAGGUAGCUUU | 2333 | AAAGCTACCTATGATAAAC | 2404 |
| 148 | 166 | CCAAAAAGAAGAAGUGGUC | 1701 | GACCACUUCUUCUUUUUGG | 1812 | CCAAAAAGAAGAAGTGGTC | 1920 |
| 37 | 55 | GCUGCUAUUCUCCGAGCUU | 59 | AAGCUCGGAGAAUAGCAGC | 469 | GCTGCTATTCTCCGAGCTT | 1896 |
| 349 | 367 | UCAAACUGGUUUCAAAGCA | 2281 | UGCUUUGAAACCAGUUUGA | 2334 | TCAAACTGGTTTCAAAGCA | 2405 |
| 365 | 383 | GCACAGAGCUCAAGUAAUU | 342 | AAUUACUUGAGCUCUGUGC | 752 | GCACAGAGCTCAAGTAATT | 1982 |
| 350 | 368 | CAAACUGGUUUCAAAGCAC | 2282 | GUGCUUUGAAACCAGUUUG | 2335 | CAAACTGGTTTCAAAGCAC | 2406 |
| 336 | 354 | AGUAAAGGACUUAUCAAAC | 2283 | GUUUGAUAAGUCCUUUACU | 2336 | AGTAAAGGACTTATCAAAC | 2407 |
| 337 | 355 | GUAAAGGACUUAUCAAACU | 314 | AGUUUGAUAAGUCCUUUAC | 724 | GTAAAGGACTTATCAAACT | 2408 |
| 214 | 232 | AAGCUACCUAUGAUAAACU | 216 | AGUUUAUCAUAGGUAGCUU | 626 | AAGCTACCTATGATAAACT | 2409 |
| 354 | 372 | CUGGUUUCAAAGCACAGAG | 2284 | CUCUGUGCUUUGAAACCAG | 2337 | CTGGTTTCAAAGCACAGAG | 2410 |
| 196 | 214 | ACUUAGUCUUGUUUGACAA | 2285 | UUGUCAAACAAGACUAAGU | 2338 | ACTTAGTCTTGTTTGACAA | 2411 |
| 236 | 254 | UAAGGAAGUUCCCAACUAU | 238 | AUAGUUGGGAACUUCCUUA | 648 | TAAGGAAGTTCCCAACTAT | 1945 |
| 357 | 375 | GUUUCAAAGCACAGAGCUC | 2286 | GAGCUCUGUGCUUUGAAAC | 2339 | GTTTCAAAGCACAGAGCTC | 2412 |

TABLE 11
RPS25 Modified duplex Sequences

| Start | End | | | | | | |
|---|---|---|---|---|---|---|---|
| Site in | Site in | | SEQ | | SEQ | | SEQ |
| NM_ | NM_ | Target Sequence | ID | Sense Oligo Sequence | ID | Antisense Oligo Sequence | ID |
| 001028.3 | 00128.3 | 5′ to 3′ | NO: | 5′ to 3′ | NO: | 5′ to 3′ | NO: |
| 245 | 263 | TCCCAACTATAAACTTATA | 1948 | UCCCAACUAUAAACUUAUAdTdT | 2071 | UAUAAGUUUAUAGUUGGGAdTdT | 2182 |
| 246 | 264 | CCCAACTATAAACTTATAA | 2340 | CCCAACUAUAAACUUAUAAdTdT | 2413 | UUAUAAGUUUAUAGUUGGGdTdT | 2466 |
| 188 | 206 | GCTCAATAACTTAGTCTTG | 1931 | GCUCAAUAACUUAGUCUUGdTdT | 2059 | CAAGACUAAGUUAUUGAGCdTdT | 2170 |
| 343 | 361 | GACTTATCAAACTGGTTTC | 1976 | GACUUAUCAAACUGGUUUCdTdT | 2093 | GAAACCAGUUUGAUAAGUCdTdT | 2204 |
| 244 | 262 | TTCCCAACTATAAACTTAT | 2341 | UUCCCAACUAUAAACUUAUdTdT | 1066 | AUAAGUUUAUAGUUGGGAAdTdT | 1476 |
| 189 | 207 | CTCAATAACTTAGTCTTGT | 1932 | CUCAAUAACUUAGUCUUGUdTdT | 1011 | ACAAGACUAAGUUAUUGAGdTdT | 1421 |
| 247 | 265 | CCAACTATAAACTTATAAC | 2342 | CCAACUAUAAACUUAUAACdTdT | 2414 | GUUAUAAGUUUAUAGUUGGdTdT | 2467 |
| 182 | 200 | GGACAAGCTCAATAACTTA | 1930 | GGACAAGCUCAAUAACUUAdTdT | 2058 | UAAGUUAUUGAGCUUGUCCdTdT | 2169 |
| 181 | 199 | GGGACAAGCTCAATAACTT | 1929 | GGGACAAGCUCAAUAACUUdTdT | 1003 | AAGUUAUUGAGCUUGUCCCdTdT | 1413 |
| 248 | 266 | CAACTATAAACTTATAACC | 1949 | CAACUAUAAACUUAUAACCdTdT | 2072 | GGUUAUAAGUUUAUAGUUGdTdT | 2183 |
| 243 | 261 | GTTCCCAACTATAAACTTA | 1947 | GUUCCCAACUAUAAACUUAdTdT | 2070 | UAAGUUUAUAGUUGGGAACdTdT | 2181 |
| 187 | 205 | AGCTCAATAACTTAGTCTT | 2343 | AGCUCAAUAACUUAGUCUUdTdT | 1009 | AAGACUAAGUUAUUGAGCUdTdT | 1419 |
| 368 | 386 | CAGAGCTCAAGTAATTTAC | 1983 | CAGAGCUCAAGUAAUUUACdTdT | 2099 | GUAAAUUACUUGAGCUCUGdTdT | 2210 |
| 344 | 362 | ACTTATCAAACTGGTTTCA | 2344 | ACUUAUCAAACUGGUUUCAdTdT | 2415 | UGAAACCAGUUUGAUAAGUdTdT | 2468 |
| 330 | 348 | CTCCTTAGTAAAGGACTTA | 1972 | CUCCUUAGUAAAGGACUUAdTdT | 2090 | UAAGUCCUUUACUAAGGAGdTdT | 2201 |
| 342 | 360 | GGACTTATCAAACTGGTTT | 2345 | GGACUUAUCAAACUGGUUUdTdT | 1139 | AAACCAGUUUGAUAAGUCCdTdT | 1549 |
| 345 | 363 | CTTATCAAACTGGTTTCAA | 1977 | CUUAUCAAACUGGUUUCAAdTdT | 2094 | UUGAAACCAGUUUGAUAAGdTdT | 2205 |
| 369 | 387 | AGAGCTCAAGTAATTTACA | 1984 | AGAGCUCAAGUAAUUUACAdTdT | 2100 | UGUAAAUUACUUGAGCUCUdTdT | 2211 |
| 454 | 472 | GTACATTTGGAAAAATAAA | 2008 | GUACAUUUGGAAAAAUAAAdTdT | 2119 | UUUAUUUUUCCAAAUGUACdTdT | 2230 |
| 378 | 396 | GTAATTTACACCAGAAATA | 1986 | GUAAUUUACACCAGAAAUAdTdT | 2102 | UAUUUCUGGUGUAAAUUACdTdT | 2213 |
| 242 | 260 | AGTTCCCAACTATAAACTT | 2346 | AGUUCCCAACUAUAAACUUdTdT | 1064 | AAGUUUAUAGUUGGGAACUdTdT | 1474 |
| 346 | 364 | TTATCAAACTGGTTTCAAA | 2347 | UUAUCAAACUGGUUUCAAAdTdT | 2416 | UUUGAAACCAGUUUGAUAAdTdT | 2469 |
| 347 | 365 | TATCAAACTGGTTTCAAAG | 2348 | UAUCAAACUGGUUUCAAAGdTdT | 2417 | CUUUGAAACCAGUUUGAUAdTdT | 2470 |
| 451 | 469 | GCTGTACATTTGGAAAAAT | 2007 | GCUGUACAUUUGGAAAAAUdTdT | 1248 | AUUUUUCCAAAUGUACAGCdTdT | 1658 |
| 333 | 351 | CTTAGTAAAGGACTTATCA | 1973 | CUUAGUAAAGGACUUAUCAdTdT | 2091 | UGAUAAGUCCUUUACUAAGdTdT | 2202 |
| 377 | 395 | AGTAATTTACACCAGAAAT | 2349 | AGUAAUUUACACCAGAAAUdTdT | 1174 | AUUUCUGGUGUAAAUUACUdTdT | 1584 |
| 452 | 470 | CTGTACATTTGGAAAAATA | 2350 | CUGUACAUUUGGAAAAAUAdTdT | 2418 | UAUUUUUCCAAAUGUACAGdTdT | 2471 |
| 183 | 201 | GACAAGCTCAATAACTTAG | 2351 | GACAAGCUCAAUAACUUAGdTdT | 2419 | CUAAGUUAUUGAGCUUGUCdTdT | 2472 |
| 239 | 257 | GGAAGTTCCCAACTATAAA | 1946 | GGAAGUUCCCAACUAUAAAdTdT | 2069 | UUUAUAGUUGGGAACUUCCdTdT | 2180 |
| 372 | 390 | GCTCAAGTAATTTACACCA | 2352 | GCUCAAGUAAUUUACACCAdTdT | 2420 | UGGUGUAAAUUACUUGAGCdTdT | 2473 |
| 217 | 235 | CTACCTATGATAAACTCTG | 1940 | CUACCUAUGAUAAACUCUGdTdT | 2064 | CAGAGUUUAUCAUAGGUAGdTdT | 2175 |
| 448 | 466 | CCAGCTGTACATTTGGAAA | 2006 | CCAGCUGUACAUUUGGAAAdTdT | 2118 | UUUCCAAAUGUACAGCUGGdTdT | 2229 |
| 329 | 347 | GCTCCTTAGTAAAGGACTT | 2353 | GCUCCUUAGUAAAGGACUUdTdT | 1126 | AAGUCCUUUACUAAGGAGCdTdT | 1536 |
| 331 | 349 | TCCTTAGTAAAGGACTTAT | 2354 | UCCUUAGUAAAGGACUUAUdTdT | 1128 | AUAAGUCCUUUACUAAGGAdTdT | 1538 |
| 31 | 49 | GTGTCTGCTGCTATTCTCC | 1894 | GUGUCUGCUGCUAUUCUCCdTdT | 2018 | GGAGAAUAGCAGCAGACACdTdT | 2129 |
| 179 | 197 | TCGGGACAAGCTCAATAAC | 2355 | UCGGGACAAGCUCAAUAACdTdT | 2421 | GUUAUUGAGCUUGUCCCGAdTdT | 2474 |
| 6 | 24 | TGTCCGACATCTTGACGAG | 1887 | UGUCCGACAUCUUGACGAGdTdT | 2014 | CUCGUCAAGAUGUCGGACAdTdT | 2125 |
| 220 | 238 | CCTATGATAAACTCTGTAA | 1941 | CCUAUGAUAAACUCUGUAAdTdT | 2065 | UUACAGAGUUUAUCAUAGGdTdT | 2176 |
| 376 | 394 | AAGTAATTTACACCAGAAA | 2356 | AAGUAAUUUACACCAGAAAdTdT | 2422 | UUUCUGGUGUAAAUUACUUdTdT | 2475 |
| 453 | 471 | TGTACATTTGGAAAAATAA | 2357 | UGUACAUUUGGAAAAAUAAdTdT | 2423 | UUAUUUUUCCAAAUGUACAdTdT | 2476 |
| 332 | 350 | CCTTAGTAAAGGACTTATC | 2358 | CCUUAGUAAAGGACUUAUCdTdT | 2424 | GAUAAGUCCUUUACUAAGGdTdT | 2477 |
| 449 | 467 | CAGCTGTACATTTGGAAAA | 2359 | CAGCUGUACAUUUGGAAAAdTdT | 2425 | UUUUCCAAAUGUACAGCUGdTdT | 2478 |
| 278 | 296 | CTCTGAGAGACTGAAGATT | 1957 | CUCUGAGAGACUGAAGAUUdTdT | 1084 | AAUCUUCAGUCUCUCAGAGdTdT | 1494 |
| 279 | 297 | TCTGAGAGACTGAAGATTC | 1958 | UCUGAGAGACUGAAGAUUCdTdT | 2079 | GAAUCUUCAGUCUCUCAGAdTdT | 2190 |
| 276 | 294 | GTCTCTGAGAGACTGAAGA | 2360 | GUCUCUGAGAGACUGAAGAdTdT | 2426 | UCUUCAGUCUCUCAGAGACdTdT | 2479 |
| 370 | 388 | GAGCTCAAGTAATTTACAC | 2361 | GAGCUCAAGUAAUUUACACdTdT | 2427 | GUGUAAAUUACUUGAGCUCdTdT | 2480 |
| 229 | 247 | AACTCTGTAAGGAAGTTCC | 1943 | AACUCUGUAAGGAAGUUCCdTdT | 2067 | GGAACUUCCUUACAGAGUUdTdT | 2178 |
| 185 | 203 | CAAGCTCAATAACTTAGTC | 2362 | CAAGCUCAAUAACUUAGUCdTdT | 2428 | GACUAAGUUAUUGAGCUUGdTdT | 2481 |
| 221 | 239 | CTATGATAAACTCTGTAAG | 2363 | CUAUGAUAAACUCUGUAAGdTdT | 2429 | CUUACAGAGUUUAUCAUAGdTdT | 2482 |
| 33 | 51 | GTCTGCTGCTATTCTCCGA | 1895 | GUCUGCUGCUAUUCUCCGAdTdT | 2019 | UCGGAGAAUAGCAGCAGACdTdT | 2130 |
| 163 | 181 | GGTCCAAAGGCAAAGTTCG | 1924 | GGUCCAAAGGCAAAGUUCGdTdT | 2053 | CGAACUUUGCCUUUGGACCdTdT | 2164 |
| 373 | 391 | CTCAAGTAATTTACACCAG | 1985 | CUCAAGUAAUUUACACCAGdTdT | 2101 | CUGGUGUAAAUUACUUGAGdTdT | 2212 |
| 375 | 393 | CAAGTAATTTACACCAGAA | 2364 | CAAGUAAUUUACACCAGAAdTdT | 2430 | UUCUGGUGUAAAUUACUUGdTdT | 2483 |
| 450 | 468 | AGCTGTACATTTGGAAAAA | 2365 | AGCUGUACAUUUGGAAAAAdTdT | 2431 | UUUUUCCAAAUGUACAGCUdTdT | 2484 |
| 180 | 198 | CGGGACAAGCTCAATAACT | 2366 | CGGGACAAGCUCAAUAACUdTdT | 1002 | AGUUAUUGAGCUUGUCCCGdTdT | 1412 |
| 190 | 208 | TCAATAACTTAGTCTTGTT | 2367 | UCAAUAACUUAGUCUUGUUdTdT | 1012 | AACAAGACUAAGUUAUUGAdTdT | 1422 |
| 203 | 221 | CTTGTTTGACAAAGCTACC | 1936 | CUUGUUUGACAAAGCUACCdTdT | 2062 | GGUAGCUUUGUCAAACAAGdTdT | 2173 |
| 462 | 480 | GGAAAAATAAAACTTTATT | 2010 | GGAAAAAUAAAACUUUAUUdTdT | 2121 | AAUAAAGUUUUAUUUUUCCdTdT | 2232 |
| 231 | 249 | CTCTGTAAGGAAGTTCCCA | 1944 | CUCUGUAAGGAAGUUCCCAdTdT | 2068 | UGGGAACUUCCUUACAGAGdTdT | 2179 |
| 30 | 48 | GGTGTCTGCTGCTATTCTC | 2368 | GGUGUCUGCUGCUAUUCUCdTdT | 2432 | GAGAAUAGCAGCAGACACCdTdT | 2485 |
| 200 | 218 | AGTCTTGTTTGACAAAGCT | 1935 | AGUCUUGUUUGACAAAGCUdTdT | 1022 | AGCUUUGUCAAACAAGACUdTdT | 1432 |
| 216 | 234 | GCTACCTATGATAAACTCT | 1939 | GCUACCUAUGAUAAACUCUdTdT | 1038 | AGAGUUUAUCAUAGGUAGCdTdT | 1448 |
| 341 | 359 | AGGACTTATCAAACTGGTT | 2369 | AGGACUUAUCAAACUGGUUdTdT | 1138 | AACCAGUUUGAUAAGUCCUdTdT | 1548 |
| 218 | 236 | TACCTATGATAAACTCTGT | 2370 | UACCUAUGAUAAACUCUGUdTdT | 1040 | ACAGAGUUUAUCAUAGGUAdTdT | 1450 |
| 461 | 479 | TGGAAAAATAAAACTTTAT | 2371 | UGGAAAAAUAAAACUUUAUdTdT | 2433 | AUAAAGUUUUAUUUUUCCAdTdT | 2486 |
| 162 | 180 | TGGTCCAAAGGCAAAGTTC | 2372 | UGGUCCAAAGGCAAAGUUCdTdT | 2434 | GAACUUUGCCUUUGGACCAdTdT | 2487 |
| 379 | 397 | TAATTTACACCAGAAATAC | 1987 | UAAUUUACACCAGAAAUACdTdT | 2103 | GUAUUUCUGGUGUAAAUUAdTdT | 2214 |
| 280 | 298 | CTGAGAGACTGAAGATTCG | 2373 | CUGAGAGACUGAAGAUUCGdTdT | 2435 | CGAAUCUUCAGUCUCUCAGdTdT | 2488 |
| 191 | 209 | CAATAACTTAGTCTTGTTT | 2374 | CAAUAACUUAGUCUUGUUUdTdT | 1013 | AAACAAGACUAAGUUAUUGdTdT | 1423 |
| 212 | 230 | CAAAGCTACCTATGATAAA | 1938 | CAAAGCUACCUAUGAUAAAdTdT | 2063 | UUUAUCAUAGGUAGCUUUGdTdT | 2174 |
| 367 | 385 | ACAGAGCTCAAGTAATTTA | 2375 | ACAGAGCUCAAGUAAUUUAdTdT | 2436 | UAAAUUACUUGAGCUCUGUdTdT | 2489 |
| 230 | 248 | ACTCTGTAAGGAAGTTCCC | 2376 | ACUCUGUAAGGAAGUUCCCdTdT | 2437 | GGGAACUUCCUUACAGAGUdTdT | 2490 |
| 274 | 292 | TGGTCTCTGAGAGACTGAA | 1956 | UGGUCUCUGAGAGACUGAAdTdT | 2078 | UUCAGUCUCUCAGAGACCAdTdT | 2189 |
| 366 | 384 | CACAGAGCTCAAGTAATTT | 2377 | CACAGAGCUCAAGUAAUUUdTdT | 1163 | AAAUUACUUGAGCUCUGUGdTdT | 1573 |
| 371 | 389 | AGCTCAAGTAATTTACACC | 2378 | AGCUCAAGUAAUUUACACCdTdT | 2438 | GGUGUAAAUUACUUGAGCUdTdT | 2491 |
| 447 | 465 | ACCAGCTGTACATTTGGAA | 2379 | ACCAGCUGUACAUUUGGAAdTdT | 2439 | UUCCAAAUGUACAGCUGGUdTdT | 2492 |
| 223 | 241 | ATGATAAACTCTGTAAGGA | 2380 | AUGAUAAACUCUGUAAGGAdTdT | 2440 | UCCUUACAGAGUUUAUCAUdTdT | 2493 |
| 460 | 478 | TTGGAAAAATAAAACTTTA | 2381 | UUGGAAAAAUAAAACUUUAdTdT | 2441 | UAAAGUUUUAUUUUUCCAAdTdT | 2494 |
| 184 | 202 | ACAAGCTCAATAACTTAGT | 2382 | AGAAGCUCAAUAACUUAGUdTdT | 1006 | ACUAAGUUAUUGAGCUUGUdTdT | 1416 |
| 277 | 295 | TCTCTGAGAGACTGAAGAT | 2383 | UCUCUGAGAGACUGAAGAUdTdT | 1083 | AUCUUCAGUCUCUCAGAGAdTdT | 1493 |
| 232 | 250 | TCTGTAAGGAAGTTCCCAA | 2384 | UCUGUAAGGAAGUUCCCAAdTdT | 2442 | UUGGGAACUUCCUUACAGAdTdT | 2495 |
| 64 | 82 | CGCCTAAGGACGACAAGAA | 1904 | CGCCUAAGGACGACAAGAAdTdT | 2027 | UUCUUGUCGUCCUUAGGCGdTdT | 2138 |
| 282 | 300 | GAGAGACTGAAGATTCGAG | 1959 | GAGAGACUGAAGAUUCGAGdTdT | 2080 | CUCGAAUCUUCAGUCUCUCdTdT | 2191 |
| 224 | 242 | TGATAAACTCTGTAAGGAA | 1942 | UGAUAAACUCUGUAAGGAAdTdT | 2066 | UUCCUUACAGAGUUUAUCAdTdT | 2177 |
| 222 | 240 | TATGATAAACTCTGTAAGG | 2385 | UAUGAUAAACUCUGUAAGGdTdT | 2443 | CCUUACAGAGUUUAUCAUAdTdT | 2496 |
| 238 | 256 | AGGAAGTTCCCAACTATAA | 2386 | AGGAAGUUCCCAACUAUAAdTdT | 2444 | UUAUAGUUGGGAACUUCCUdTdT | 2497 |
| 254 | 272 | TAAACTTATAACCCCAGCT | 1950 | UAAACUUAUAACCCCAGCUdTdT | 2073 | AGCUGGGGUUAUAAGUUUAdTdT | 2184 |
| 275 | 293 | GGTCTCTGAGAGACTGAAG | 2387 | GGUCUCUGAGAGACUGAAGdTdT | 2445 | CUUCAGUCUCUCAGAGACCdTdT | 2498 |
| 219 | 237 | ACCTATGATAAACTCTGTA | 2388 | ACCUAUGAUAAACUCUGUAdTdT | 2446 | UACAGAGUUUAUCAUAGGUdTdT | 2499 |
| 186 | 204 | AAGCTCAATAACTTAGTCT | 2389 | AAGCUCAAUAACUUAGUCUdTdT | 1008 | AGACUAAGUUAUUGAGCUUdTdT | 1418 |
| 455 | 473 | TACATTTGGAAAAATAAAA | 2390 | UACAUUUGGAAAAAUAAAAdTdT | 2447 | UUUUAUUUUUCCAAAUGUAdTdT | 2500 |
| 197 | 215 | CTTAGTCTTGTTTGACAAA | 1934 | CUUAGUCUUGUUUGACAAAdTdT | 2061 | UUUGUCAAACAAGACUAAGdTdT | 2172 |
| 29 | 47 | CGGTGTCTGCTGCTATTCT | 1893 | CGGUGUCUGCUGCUAUUCUdTdT | 871 | AGAAUAGCAGCAGACACCGdTdT | 1281 |
| 456 | 474 | ACATTTGGAAAAATAAAAC | 2009 | AGAUUUGGAAAAAUAAAACdTdT | 2120 | GUUUUAUUUUUCCAAAUGUdTdT | 2231 |
| 34 | 52 | TCTGCTGCTATTCTCCGAG | 2391 | UCUGCUGCUAUUCUCCGAGdTdT | 2448 | CUCGGAGAAUAGCAGCAGAdTdT | 2501 |
| 423 | 441 | GGTGAAGATGCATGAATAG | 1999 | GGUGAAGAUGCAUGAAUAGdTdT | 2113 | CUAUUCAUGCAUCUUCACCdTdT | 2224 |
| 1 | 19 | CTTTTTGTCCGACATCTTG | 1885 | CUUUUUGUCCGACAUCUUGdTdT | 2012 | CAAGAUGUCGGACAAAAAGdTdT | 2123 |
| 348 | 366 | ATCAAACTGGTTTCAAAGC | 1978 | AUCAAACUGGUUUCAAAGCdTdT | 2095 | GCUUUGAAACCAGUUUGAUdTdT | 2206 |
| 240 | 258 | GAAGTTCCCAACTATAAAC | 2392 | GAAGUUCCCAACUAUAAACdTdT | 2449 | GUUUAUAGUUGGGAACUUCdTdT | 2502 |
| 255 | 273 | AAACTTATAACCCCAGCTG | 1951 | AAACUUAUAACCCCAGCUGdTdT | 2074 | CAGCUGGGGUUAUAAGUUUdTdT | 2185 |
| 215 | 233 | AGCTACCTATGATAAACTC | 2393 | AGCUACCUAUGAUAAACUCdTdT | 2450 | GAGUUUAUCAUAGGUAGCUdTdT | 2503 |
| 382 | 400 | TTTACACCAGAAATACCAA | 2394 | UUUACACCAGAAAUACCAAdTdT | 2451 | UUGGUAUUUCUGGUGUAAAdTdT | 2504 |
| 353 | 371 | ACTGGTTTCAAAGCACAGA | 1979 | ACUGGUUUCAAAGCACAGAdTdT | 2096 | UCUGUGCUUUGAAACCAGUdTdT | 2207 |
| 326 | 344 | GGAGCTCCTTAGTAAAGGA | 1971 | GGAGCUCCUUAGUAAAGGAdTdT | 2089 | UCCUUUACUAAGGAGCUCCdTdT | 2200 |
| 202 | 220 | TCTTGTTTGACAAAGCTAC | 2395 | UCUUGUUUGACAAAGCUACdTdT | 2452 | GUAGCUUUGUCAAACAAGAdTdT | 2505 |
| 45 | 63 | TCTCCGAGCTTCGCAATGC | 1898 | UCUCCGAGCUUCGCAAUGCdTdT | 2021 | GCAUUGCGAAGCUCGGAGAdTdT | 2132 |
| 419 | 437 | TGCTGGTGAAGATGCATGA | 1998 | UGCUGGUGAAGAUGCAUGAdTdT | 2112 | UCAUGCAUCUUCACCAGCAdTdT | 2223 |
| 178 | 196 | TTCGGGACAAGCTCAATAA | 1928 | UUCGGGACAAGCUCAAUAAdTdT | 2057 | UUAUUGAGCUUGUCCCGAAdTdT | 2168 |
| 44 | 62 | TTCTCCGAGCTTCGCAATG | 2396 | UUCUCCGAGCUUCGCAAUGdTdT | 2453 | CAUUGCGAAGCUCGGAGAAdTdT | 2506 |
| 335 | 353 | TAGTAAAGGACTTATCAAA | 1974 | UAGUAAAGGACUUAUCAAAdTdT | 2092 | UUUGAUAAGUCCUUUACUAdTdT | 2203 |
| 251 | 269 | CTATAAACTTATAACCCCA | 2397 | CUAUAAACUUAUAACCCCAdTdT | 2454 | UGGGGUUAUAAGUUUAUAGdTdT | 2507 |
| 374 | 392 | TCAAGTAATTTACACCAGA | 2398 | UCAAGUAAUUUACACCAGAdTdT | 2455 | UCUGGUGUAAAUUACUUGAdTdT | 2508 |
| 151 | 169 | AAAAGAAGAAGTGGTCCAA | 1921 | AAAAGAAGAAGUGGUCCAAdTdT | 2051 | UUGGACCACUUCUUCUUUUdTdT | 2162 |
| 164 | 182 | GTCCAAAGGCAAAGTTCGG | 2399 | GUCCAAAGGCAAAGUUCGGdTdT | 2456 | CCGAACUUUGCCUUUGGACdTdT | 2509 |
| 253 | 271 | ATAAACTTATAACCCCAGC | 2400 | AUAAACUUAUAACCCCAGCdTdT | 2457 | GCUGGGGUUAUAAGUUUAUdTdT | 2510 |
| 32 | 50 | TGTCTGCTGCTATTCTCCG | 2401 | UGUCUGCUGCUAUUCUCCGdTdT | 2458 | CGGAGAAUAGCAGCAGACAdTdT | 2511 |
| 146 | 164 | GGCCAAAAAGAAGAAGTGG | 1919 | GGCCAAAAAGAAGAAGUGGdTdT | 2049 | CCACUUCUUCUUUUUGGCCdTdT | 2160 |
| 323 | 341 | TCAGGAGCTCCTTAGTAAA | 1970 | UCAGGAGCUCCUUAGUAAAdTdT | 2088 | UUUACUAAGGAGCUCCUGAdTdT | 2199 |
| 358 | 376 | TTTCAAAGCACAGAGCTCA | 1980 | UUUCAAAGCACAGAGCUCAdTdT | 2097 | UGAGCUCUGUGCUUUGAAAdTdT | 2208 |
| 241 | 259 | AAGTTCCCAACTATAAACT | 2402 | AAGUUCCCAACUAUAAACUdTdT | 1063 | AGUUUAUAGUUGGGAACUUdTdT | 1473 |
| 206 | 224 | GTTTGACAAAGCTACCTAT | 1937 | GUUUGACAAAGCUACCUAUdTdT | 1028 | AUAGGUAGCUUUGUCAAACdTdT | 1438 |
| 328 | 346 | AGCTCCTTAGTAAAGGACT | 2403 | AGCUCCUUAGUAAAGGACUdTdT | 1125 | AGUCCUUUACUAAGGAGCUdTdT | 1535 |
| 213 | 231 | AAAGCTACCTATGATAAAC | 2404 | AAAGCUACCUAUGAUAAACdTdT | 2459 | GUUUAUCAUAGGUAGCUUUdTdT | 2512 |
| 148 | 166 | CCAAAAAGAAGAAGTGGTC | 1920 | CCAAAAAGAAGAAGUGGUCdTdT | 2050 | GACCACUUCUUCUUUUUGGdTdT | 2161 |
| 37 | 55 | GCTGCTATTCTCCGAGCTT | 1896 | GCUGCUAUUCUCCGAGCUUdTdT | 879 | AAGCUCGGAGAAUAGCAGCdTdT | 1289 |
| 349 | 367 | TCAAACTGGTTTCAAAGCA | 2405 | UCAAACUGGUUUCAAAGCAdTdT | 2460 | UGCUUUGAAACCAGUUUGAdTdT | 2513 |
| 365 | 383 | GCACAGAGCTCAAGTAATT | 1982 | GCACAGAGCUCAAGUAAUUdTdT | 1162 | AAUUACUUGAGCUCUGUGCdTdT | 1572 |
| 350 | 368 | CAAACTGGTTTCAAAGCAC | 2406 | CAAACUGGUUUCAAAGCACdTdT | 2461 | GUGCUUUGAAACCAGUUUGdTdT | 2514 |
| 336 | 354 | AGTAAAGGACTTATCAAAC | 2407 | AGUAAAGGACUUAUCAAACdTdT | 2462 | GUUUGAUAAGUCCUUUACUdTdT | 2515 |
| 337 | 355 | GTAAAGGACTTATCAAACT | 2408 | GUAAAGGACUUAUCAAACUdTdT | 1134 | AGUUUGAUAAGUCCUUUACdTdT | 1544 |
| 214 | 232 | AAGCTACCTATGATAAACT | 2409 | AAGCUACCUAUGAUAAACUdTdT | 1036 | AGUUUAUCAUAGGUAGCUUdTdT | 1446 |
| 354 | 372 | CTGGTTTCAAAGCACAGAG | 2410 | CUGGUUUCAAAGCACAGAGdTdT | 2463 | CUCUGUGCUUUGAAACCAGdTdT | 2516 |
| 196 | 214 | ACTTAGTCTTGTTTGACAA | 2411 | ACUUAGUCUUGUUUGACAAdTdT | 2464 | UUGUCAAACAAGACUAAGUdTdT | 2517 |
| 236 | 254 | TAAGGAAGTTCCCAACTAT | 1945 | UAAGGAAGUUCCCAACUAUdTdT | 1058 | AUAGUUGGGAACUUCCUUAdTdT | 1468 |
| 357 | 375 | GTTTCAAAGCACAGAGCTC | 2412 | GUUUCAAAGCACAGAGCUCdTdT | 2465 | GAGCUCUGUGCUUUGAAACdTdT | 2518 |

TABLE 12
RPS25 Modified duplex Sequences

| Alnylam | | | | SEQ | | | SEQ |
|---|---|---|---|---|---|---|---|
| Duplex | | | | ID | Antisense | | ID |
| Designation | Duplex ID | Sense ID | Sense Sequence 5′ to 3′ | NO: | ID | Antisense Sequence 5′ to 3′ | NO: |
| AD- | XD-18245 | X61218 | AUGCCGCCUAAGGACGACUdTdT | 902 | X61219 | AGUCGUCCUUAGGCGGCAUdTdT | 1312 |
| 960560.1 | | | | | | | |
| AD- | XD-18246 | X61220 | UGCCGCCUAAGGACGACAUdTdT | 903 | X61221 | AUGUCGUCCUUAGGCGGCAdTdT | 1313 |
| 960561.1 | | | | | | | |
| AD- | XD-18247 | X61222 | CCGCCUAAGGACGACAAGUdTdT | 905 | X61223 | ACUUGUCGUCCUUAGGCGGdTdT | 1315 |
| 960563.1 | | | | | | | |
| AD- | XD-18248 | X61224 | CGCCUAAGGACGACAAGAUdTdT | 906 | X61225 | AUCUUGUCGUCCUUAGGCGdTdT | 1316 |
| 960564.1 | | | | | | | |
| AD- | XD-18249 | X61226 | GCCUAAGGACGACAAGAAUdTdT | 907 | X61227 | AUUCUUGUCGUCCUUAGGCdTdT | 1317 |
| 960565.1 | | | | | | | |
| AD- | XD-18250 | X61228 | CUAAGGACGACAAGAAGAUdTdT | 909 | X61229 | AUCUUCUUGUCGUCCUUAGdTdT | 1319 |
| 960567.1 | | | | | | | |
| AD- | XD-18251 | X61230 | UAAGGACGACAAGAAGAAUdTdT | 910 | X61231 | AUUCUUCUUGUCGUCCUUAdTdT | 1320 |
| 960568.1 | | | | | | | |
| AD- | XD-18252 | X61232 | AAGGACGACAAGAAGAAGUdTdT | 911 | X61233 | ACUUCUUCUUGUCGUCCUUdTdT | 1321 |
| 960569.1 | | | | | | | |
| AD- | XD-18253 | X61234 | GGACGACAAGAAGAAGAAUdTdT | 913 | X61235 | AUUCUUCUUCUUGUCGUCCdTdT | 1323 |
| 960571.1 | | | | | | | |
| AD- | XD-18254 | X61236 | GACGACAAGAAGAAGAAGUdTdT | 914 | X61237 | ACUUCUUCUUCUUGUCGUCdTdT | 1324 |
| 960572.1 | | | | | | | |
| AD- | XD-18255 | X61238 | ACGACAAGAAGAAGAAGGUdTdT | 915 | X61239 | ACCUUCUUCUUCUUGUCGUdTdT | 1325 |
| 960573.1 | | | | | | | |
| AD- | XD-18256 | X61240 | GACAAGAAGAAGAAGGACUdTdT | 917 | X61241 | AGUCCUUCUUCUUCUUGUCdTdT | 1327 |
| 960575.1 | | | | | | | |
| AD- | XD-18257 | X61242 | ACAAGAAGAAGAAGGACGUdTdT | 918 | X61243 | ACGUCCUUCUUCUUCUUGUdTdT | 1328 |
| 960576.1 | | | | | | | |
| AD- | XD-18258 | X61244 | CAAGAAGAAGAAGGACGCUdTdT | 919 | X61245 | AGCGUCCUUCUUCUUCUUGdTdT | 1329 |
| 960577.1 | | | | | | | |
| AD- | XD-18259 | X61246 | AGAAGAAGAAGGACGCUGUdTdT | 921 | X61247 | ACAGCGUCCUUCUUCUUCUdTdT | 1331 |
| 960579.1 | | | | | | | |
| AD- | XD-18260 | X61248 | GAAGAAGAAGGACGCUGGUdTdT | 922 | X61249 | ACCAGCGUCCUUCUUCUUCdTdT | 1332 |
| 960580.1 | | | | | | | |
| AD- | XD-18261 | X61250 | AAGAAGAAGGACGCUGGAUdTdT | 923 | X61251 | AUCCAGCGUCCUUCUUCUUdTdT | 1333 |
| 960581.1 | | | | | | | |
| AD- | XD-18262 | X61252 | AGAAGAAGGACGCUGGAAUdTdT | 924 | X61253 | AUUCCAGCGUCCUUCUUCUdTdT | 1334 |
| 960582.1 | | | | | | | |
| AD- | XD-18263 | X61254 | AAGAAGGACGCUGGAAAGUdTdT | 926 | X61255 | ACUUUCCAGCGUCCUUCUUdTdT | 1336 |
| 960584.1 | | | | | | | |
| AD- | XD-18264 | X61256 | AGAAGGACGCUGGAAAGUUdTdT | 927 | X61257 | AACUUUCCAGCGUCCUUCUdTdT | 1337 |
| 960585.1 | | | | | | | |
| AD- | XD-18265 | X61258 | GAAGGACGCUGGAAAGUCUdTdT | 928 | X61259 | AGACUUUCCAGCGUCCUUCdTdT | 1338 |
| 960586.1 | | | | | | | |
| AD- | XD-18266 | X61260 | AGGACGCUGGAAAGUCGGUdTdT | 930 | X61261 | ACCGACUUUCCAGCGUCCUdTdT | 1340 |
| 960588.1 | | | | | | | |
| AD- | XD-18267 | X61262 | GGACGCUGGAAAGUCGGCUdTdT | 931 | X61263 | AGCCGACUUUCCAGCGUCCdTdT | 1341 |
| 960589.1 | | | | | | | |
| AD- | XD-18268 | X61264 | GACGCUGGAAAGUCGGCCUdTdT | 932 | X61265 | AGGCCGACUUUCCAGCGUCdTdT | 1342 |
| 960590.1 | | | | | | | |
| AD- | XD-18269 | X61266 | CGCUGGAAAGUCGGCCAAUdTdT | 934 | X61267 | AUUGGCCGACUUUCCAGCGdTdT | 1344 |
| 960592.1 | | | | | | | |
| AD- | XD-18270 | X61268 | GCUGGAAAGUCGGCCAAGUdTdT | 935 | X61269 | ACUUGGCCGACUUUCCAGCdTdT | 1345 |
| 960593.1 | | | | | | | |
| AD- | XD-18271 | X61270 | CUGGAAAGUCGGCCAAGAUdTdT | 936 | X61271 | AUCUUGGCCGACUUUCCAGdTdT | 1346 |
| 960594.1 | | | | | | | |
| AD- | XD-18272 | X61272 | GGAAAGUCGGCCAAGAAAUdTdT | 938 | X61273 | AUUUCUUGGCCGACUUUCCdTdT | 1348 |
| 960596.1 | | | | | | | |
| AD- | XD-18273 | X61274 | GAAAGUCGGCCAAGAAAGUdTdT | 939 | X61275 | ACUUUCUUGGCCGACUUUCdTdT | 1349 |
| 960597.1 | | | | | | | |
| AD- | XD-18274 | X61276 | AAAGUCGGCCAAGAAAGAUdTdT | 940 | X61277 | AUCUUUCUUGGCCGACUUUdTdT | 1350 |
| 960598.1 | | | | | | | |
| AD- | XD-18275 | X61278 | AGUCGGCCAAGAAAGACAUdTdT | 942 | X61279 | AUGUCUUUCUUGGCCGACUdTdT | 1352 |
| 960600.1 | | | | | | | |
| AD- | XD-18276 | X61280 | GUCGGCCAAGAAAGACAAUdTdT | 943 | X61281 | AUUGUCUUUCUUGGCCGACdTdT | 1353 |
| 960601.1 | | | | | | | |
| AD- | XD-18277 | X61282 | UCGGCCAAGAAAGACAAAUdTdT | 944 | X61283 | AUUUGUCUUUCUUGGCCGAdTdT | 1354 |
| 960602.1 | | | | | | | |
| AD- | XD-18278 | X61284 | GGCCAAGAAAGACAAAGAUdTdT | 946 | X61285 | AUCUUUGUCUUUCUUGGCCdTdT | 1356 |
| 960604.1 | | | | | | | |
| AD- | XD-18279 | X61286 | GCCAAGAAAGACAAAGACUdTdT | 947 | X61287 | AGUCUUUGUCUUUCUUGGCdTdT | 1357 |
| 960605.1 | | | | | | | |
| AD- | XD-18280 | X61288 | CCAAGAAAGACAAAGACCUdTdT | 948 | X61289 | AGGUCUUUGUCUUUCUUGGdTdT | 1358 |
| 960606.1 | | | | | | | |
| AD- | XD-18281 | X61290 | AGAAAGACAAAGACCCAGUdTdT | 950 | X61291 | ACUGGGUCUUUGUCUUUCUdTdT | 1360 |
| 960608.1 | | | | | | | |
| AD- | XD-18282 | X61292 | GAAAGACAAAGACCCAGUUdTdT | 951 | X61293 | AACUGGGUCUUUGUCUUUCdTdT | 1361 |
| 960609.1 | | | | | | | |
| AD- | XD-18283 | X61294 | AAAGACAAAGACCCAGUGUdTdT | 952 | X61295 | ACACUGGGUCUUUGUCUUUdTdT | 1362 |
| 960610.1 | | | | | | | |
| AD- | XD-18284 | X61296 | AGACAAAGACCCAGUGAAUdTdT | 954 | X61297 | AUUCACUGGGUCUUUGUCUdTdT | 1364 |
| 960612.1 | | | | | | | |
| AD- | XD-18285 | X61298 | GACAAAGACCCAGUGAACUdTdT | 955 | X61299 | AGUUCACUGGGUCUUUGUCdTdT | 1365 |
| 960613.1 | | | | | | | |
| AD- | XD-18286 | X61300 | ACAAAGACCCAGUGAACAUdTdT | 956 | X61301 | AUGUUCACUGGGUCUUUGUdTdT | 1366 |
| 960614.1 | | | | | | | |
| AD- | XD-18287 | X61302 | CAAAGACCCAGUGAACAAUdTdT | 957 | X61303 | AUUGUUCACUGGGUCUUUGdTdT | 1367 |
| 960615.1 | | | | | | | |
| AD- | XD-18288 | X61304 | AAGACCCAGUGAACAAAUUdTdT | 959 | X61305 | AAUUUGUUCACUGGGUCUUdTdT | 1369 |
| 960617.1 | | | | | | | |
| AD- | XD-18289 | X61306 | AGACCCAGUGAACAAAUCUdTdT | 960 | X61307 | AGAUUUGUUCACUGGGUCUdTdT | 1370 |
| 960618.1 | | | | | | | |
| AD- | XD-18290 | X61308 | GACCCAGUGAACAAAUCCUdTdT | 961 | X61309 | AGGAUUUGUUCACUGGGUCdTdT | 1371 |
| 960619.1 | | | | | | | |
| AD- | XD-18291 | X61310 | CCCAGUGAACAAAUCCGGUdTdT | 963 | X61311 | ACCGGAUUUGUUCACUGGGdTdT | 1373 |
| 960621.1 | | | | | | | |
| AD- | XD-18292 | X61312 | GGGCAAGGCCAAAAAGAAUdTdT | 964 | X61313 | AUUCUUUUUGGCCUUGCCCdTdT | 1374 |
| 960622.1 | | | | | | | |
| AD- | XD-18293 | X61314 | GGCAAGGCCAAAAAGAAGUdTdT | 965 | X61315 | ACUUCUUUUUGGCCUUGCCdTdT | 1375 |
| 960623.1 | | | | | | | |
| AD- | XD-18294 | X61316 | AGGCCAAAAAGAAGAAGUUdTdT | 967 | X61317 | AACUUCUUCUUUUUGGCCUdTdT | 1377 |
| 960625.1 | | | | | | | |
| AD- | XD-18295 | X61318 | GGCCAAAAAGAAGAAGUGUdTdT | 968 | X61319 | ACACUUCUUCUUUUUGGCCdTdT | 1378 |
| 960626.1 | | | | | | | |
| AD- | XD-18296 | X61320 | GCCAAAAAGAAGAAGUGGUdTdT | 969 | X61321 | ACCACUUCUUCUUUUUGGCdTdT | 1379 |
| 960627.1 | | | | | | | |
| AD- | XD-18297 | X61322 | CAAAAAGAAGAAGUGGUCUdTdT | 971 | X61323 | AGACCACUUCUUCUUUUUGdTdT | 1381 |
| 960629.1 | | | | | | | |
| AD- | XD-18298 | X61324 | AAAAAGAAGAAGUGGUCCUdTdT | 972 | X61325 | AGGACCACUUCUUCUUUUUdTdT | 1382 |
| 960630.1 | | | | | | | |
| AD- | XD-18299 | X61326 | AAAAGAAGAAGUGGUCCAUdTdT | 973 | X61327 | AUGGACCACUUCUUCUUUUdTdT | 1383 |
| 960631.1 | | | | | | | |
| AD- | XD-18300 | X61328 | AAGAAGAAGUGGUCCAAAUdTdT | 975 | X61329 | AUUUGGACCACUUCUUCUUdTdT | 1385 |
| 960633.1 | | | | | | | |
| AD- | XD-18301 | X61330 | AGAAGAAGUGGUCCAAAGUdTdT | 976 | X61331 | ACUUUGGACCACUUCUUCUdTdT | 1386 |
| 960634.1 | | | | | | | |
| AD- | XD-18302 | X61332 | GAAGAAGUGGUCCAAAGGUdTdT | 977 | X61333 | ACCUUUGGACCACUUCUUCdTdT | 1387 |
| 960635.1 | | | | | | | |
| AD- | XD-18303 | X61334 | AGAAGUGGUCCAAAGGCAUdTdT | 979 | X61335 | AUGCCUUUGGACCACUUCUdTdT | 1389 |
| 960637.1 | | | | | | | |
| AD- | XD-18304 | X61336 | GAAGUGGUCCAAAGGCAAUdTdT | 980 | X61337 | AUUGCCUUUGGACCACUUCdTdT | 1390 |
| 960638.1 | | | | | | | |
| AD- | XD-18305 | X61338 | AAGUGGUCCAAAGGCAAAUdTdT | 981 | X61339 | AUUUGCCUUUGGACCACUUdTdT | 1391 |
| 960639.1 | | | | | | | |
| AD- | XD-18306 | X61340 | GUGGUCCAAAGGCAAAGUUdTdT | 983 | X61341 | AACUUUGCCUUUGGACCACdTdT | 1393 |
| 960641.1 | | | | | | | |
| AD- | XD-18307 | X61342 | UGGUCCAAAGGCAAAGUUUdTdT | 984 | X61343 | AAACUUUGCCUUUGGACCAdTdT | 1394 |
| 960642.1 | | | | | | | |
| AD- | XD-18308 | X61344 | GGUCCAAAGGCAAAGUUCUdTdT | 985 | X61345 | AGAACUUUGCCUUUGGACCdTdT | 1395 |
| 960643.1 | | | | | | | |
| AD- | XD-18309 | X61346 | UCCAAAGGCAAAGUUCGGUdTdT | 987 | X61347 | ACCGAACUUUGCCUUUGGAdTdT | 1397 |
| 960645.1 | | | | | | | |
| AD- | XD-18310 | X61348 | CCAAAGGCAAAGUUCGGGUdTdT | 988 | X61349 | ACCCGAACUUUGCCUUUGGdTdT | 1398 |
| 960646.1 | | | | | | | |
| AD- | XD-18311 | X61350 | CAAAGGCAAAGUUCGGGAUdTdT | 989 | X61351 | AUCCCGAACUUUGCCUUUGdTdT | 1399 |
| 960647.1 | | | | | | | |
| AD- | XD-18312 | X61352 | AAGGCAAAGUUCGGGACAUdTdT | 991 | X61353 | AUGUCCCGAACUUUGCCUUdTdT | 1401 |
| 960649.1 | | | | | | | |
| AD- | XD-18313 | X61354 | AGGCAAAGUUCGGGACAAUdTdT | 992 | X61355 | AUUGUCCCGAACUUUGCCUdTdT | 1402 |
| 960650.1 | | | | | | | |
| AD- | XD-18314 | X61356 | GGCAAAGUUCGGGACAAGUdTdT | 993 | X61357 | ACUUGUCCCGAACUUUGCCdTdT | 1403 |
| 960651.1 | | | | | | | |
| AD- | XD-18315 | X61358 | CAAAGUUCGGGACAAGCUUdTdT | 995 | X61359 | AAGCUUGUCCCGAACUUUGdTdT | 1405 |
| 960653.1 | | | | | | | |
| AD- | XD-18316 | X61360 | AAAGUUCGGGACAAGCUCUdTdT | 996 | X61361 | AGAGCUUGUCCCGAACUUUdTdT | 1406 |
| 960654.1 | | | | | | | |
| AD- | XD-18317 | X61362 | AAGUUCGGGACAAGCUCAUdTdT | 997 | X61363 | AUGAGCUUGUCCCGAACUUdTdT | 1407 |
| 960655.1 | | | | | | | |
| AD- | XD-18318 | X61364 | AGUUCGGGACAAGCUCAAUdTdT | 998 | X61365 | AUUGAGCUUGUCCCGAACUdTdT | 1408 |
| 960656.1 | | | | | | | |
| AD- | XD-18319 | X61366 | UUCGGGACAAGCUCAAUAUdTdT | 1000 | X61367 | AUAUUGAGCUUGUCCCGAAdTdT | 1410 |
| 960658.1 | | | | | | | |
| AD- | XD-18320 | X61368 | UCGGGACAAGCUCAAUAAUdTdT | 1001 | X61369 | AUUAUUGAGCUUGUCCCGAdTdT | 1411 |
| 960659.1 | | | | | | | |
| AD- | XD-18321 | X61370 | CGGGACAAGCUCAAUAACUdTdT | 1002 | X61371 | AGUUAUUGAGCUUGUCCCGdTdT | 1412 |
| 960660.1 | | | | | | | |
| AD- | XD-18322 | X61372 | GGACAAGCUCAAUAACUUUdTdT | 1004 | X61373 | AAAGUUAUUGAGCUUGUCCdTdT | 1414 |
| 960662.1 | | | | | | | |
| AD- | XD-18323 | X61374 | GACAAGCUCAAUAACUUAUdTdT | 1005 | X61375 | AUAAGUUAUUGAGCUUGUCdTdT | 1415 |
| 960663.1 | | | | | | | |
| AD- | XD-18324 | X61376 | ACAAGCUCAAUAACUUAGUdTdT | 1006 | X61377 | ACUAAGUUAUUGAGCUUGUdTdT | 1416 |
| 960664.1 | | | | | | | |
| AD- | XD-18325 | X61378 | AAGCUCAAUAACUUAGUCUdTdT | 1008 | X61379 | AGACUAAGUUAUUGAGCUUdTdT | 1418 |
| 960666.1 | | | | | | | |
| AD- | XD-18326 | X61380 | AGCUCAAUAACUUAGUCUUdTdT | 1009 | X61381 | AAGACUAAGUUAUUGAGCUdTdT | 1419 |
| 960667.1 | | | | | | | |
| AD- | XD-18327 | X61382 | GCUCAAUAACUUAGUCUUUdTdT | 1010 | X61383 | AAAGACUAAGUUAUUGAGCdTdT | 1420 |
| 960668.1 | | | | | | | |
| AD- | XD-18328 | X61384 | UCAAUAACUUAGUCUUGUUdTdT | 1012 | X61385 | AACAAGACUAAGUUAUUGAdTdT | 1422 |
| 960670.1 | | | | | | | |
| AD- | XD-18329 | X61386 | CAAUAACUUAGUCUUGUUUdTdT | 1013 | X61387 | AAACAAGACUAAGUUAUUGdTdT | 1423 |
| 960671.1 | | | | | | | |
| AD- | XD-18330 | X61388 | AAUAACUUAGUCUUGUUUUdTdT | 1014 | X61389 | AAAACAAGACUAAGUUAUUdTdT | 1424 |
| 960672.1 | | | | | | | |
| AD- | XD-18331 | X61390 | UAACUUAGUCUUGUUUGAUdTdT | 1016 | X61391 | AUCAAACAAGACUAAGUUAdTdT | 1426 |
| 960674.1 | | | | | | | |
| AD- | XD-18332 | X61392 | AACUUAGUCUUGUUUGACUdTdT | 1017 | X61393 | AGUCAAACAAGACUAAGUUdTdT | 1427 |
| 960675.1 | | | | | | | |
| AD- | XD-18333 | X61394 | ACUUAGUCUUGUUUGACAUdTdT | 1018 | X61395 | AUGUCAAACAAGACUAAGUdTdT | 1428 |
| 960676.1 | | | | | | | |
| AD- | XD-18334 | X61396 | UUAGUCUUGUUUGACAAAUdTdT | 1020 | X61397 | AUUUGUCAAACAAGACUAAdTdT | 1430 |
| 960678.1 | | | | | | | |
| AD- | XD-18335 | X61398 | UAGUCUUGUUUGACAAAGUdTdT | 1021 | X61399 | ACUUUGUCAAACAAGACUAdTdT | 1431 |
| 960679.1 | | | | | | | |
| AD- | XD-18336 | X61400 | AGUCUUGUUUGACAAAGCUdTdT | 1022 | X61401 | AGCUUUGUCAAACAAGACUdTdT | 1432 |
| 960680.1 | | | | | | | |
| AD- | XD-18337 | X61402 | UCUUGUUUGACAAAGCUAUdTdT | 1024 | X61403 | AUAGCUUUGUCAAACAAGAdTdT | 1434 |
| 960682.1 | | | | | | | |
| AD- | XD-18338 | X61404 | CUUGUUUGACAAAGCUACUdTdT | 1025 | X61405 | AGUAGCUUUGUCAAACAAGdTdT | 1435 |
| 960683.1 | | | | | | | |
| AD- | XD-18339 | X61406 | UUGUUUGACAAAGCUACCUdTdT | 1026 | X61407 | AGGUAGCUUUGUCAAACAAdTdT | 1436 |
| 960684.1 | | | | | | | |
| AD- | XD-18340 | X61408 | GUUUGACAAAGCUACCUAUdTdT | 1028 | X61409 | AUAGGUAGCUUUGUCAAACdTdT | 1438 |
| 960686.1 | | | | | | | |
| AD- | XD-18341 | X61410 | UUUGACAAAGCUACCUAUUdTdT | 1029 | X61411 | AAUAGGUAGCUUUGUCAAAdTdT | 1439 |
| 960687.1 | | | | | | | |
| AD- | XD-18342 | X61412 | UUGACAAAGCUACCUAUGUdTdT | 1030 | X61413 | ACAUAGGUAGCUUUGUCAAdTdT | 1440 |
| 960688.1 | | | | | | | |
| AD- | XD-18343 | X61414 | UGACAAAGCUACCUAUGAUdTdT | 1031 | X61415 | AUCAUAGGUAGCUUUGUCAdTdT | 1441 |
| 960689.1 | | | | | | | |
| AD- | XD-18344 | X61416 | ACAAAGCUACCUAUGAUAUdTdT | 1033 | X61417 | AUAUCAUAGGUAGCUUUGUdTdT | 1443 |
| 960691.1 | | | | | | | |
| AD- | XD-18345 | X61418 | CAAAGCUACCUAUGAUAAUdTdT | 1034 | X61419 | AUUAUCAUAGGUAGCUUUGdTdT | 1444 |
| 960692.1 | | | | | | | |
| AD- | XD-18346 | X61420 | AAAGCUACCUAUGAUAAAUdTdT | 1035 | X61421 | AUUUAUCAUAGGUAGCUUUdTdT | 1445 |
| 960693.1 | | | | | | | |
| AD- | XD-18347 | X61422 | AGCUACCUAUGAUAAACUUdTdT | 1037 | X61423 | AAGUUUAUCAUAGGUAGCUdTdT | 1447 |
| 960695.1 | | | | | | | |
| AD- | XD-18348 | X61424 | GCUACCUAUGAUAAACUCUdTdT | 1038 | X61425 | AGAGUUUAUCAUAGGUAGCdTdT | 1448 |
| 960696.1 | | | | | | | |
| AD- | XD-18349 | X61426 | CUACCUAUGAUAAACUCUUdTdT | 1039 | X61427 | AAGAGUUUAUCAUAGGUAGdTdT | 1449 |
| 960697.1 | | | | | | | |
| AD- | XD-18350 | X61428 | ACCUAUGAUAAACUCUGUUdTdT | 1041 | X61429 | AACAGAGUUUAUCAUAGGUdTdT | 1451 |
| 960699.1 | | | | | | | |
| AD- | XD-18351 | X61430 | CCUAUGAUAAACUCUGUAUdTdT | 1042 | X61431 | AUACAGAGUUUAUCAUAGGdTdT | 1452 |
| 960700.1 | | | | | | | |
| AD- | XD-18352 | X61432 | CUAUGAUAAACUCUGUAAUdTdT | 1043 | X61433 | AUUACAGAGUUUAUCAUAGdTdT | 1453 |
| 960701.1 | | | | | | | |
| AD- | XD-18353 | X61434 | AUGAUAAACUCUGUAAGGUdTdT | 1045 | X61435 | ACCUUACAGAGUUUAUCAUdTdT | 1455 |
| 960703.1 | | | | | | | |
| AD- | XD-18354 | X61436 | UGAUAAACUCUGUAAGGAUdTdT | 1046 | X61437 | AUCCUUACAGAGUUUAUCAdTdT | 1456 |
| 960704.1 | | | | | | | |
| AD- | XD-18355 | X61438 | GAUAAACUCUGUAAGGAAUdTdT | 1047 | X61439 | AUUCCUUACAGAGUUUAUCdTdT | 1457 |
| 960705.1 | | | | | | | |
| AD- | XD-18356 | X61440 | UAAACUCUGUAAGGAAGUUdTdT | 1049 | X61441 | AACUUCCUUACAGAGUUUAdTdT | 1459 |
| 960707.1 | | | | | | | |
| AD- | XD-18357 | X61442 | AAACUCUGUAAGGAAGUUUdTdT | 1050 | X61443 | AAACUUCCUUACAGAGUUUdTdT | 1460 |
| 960708.1 | | | | | | | |
| AD- | XD-18358 | X61444 | AACUCUGUAAGGAAGUUCUdTdT | 1051 | X61445 | AGAACUUCCUUACAGAGUUdTdT | 1461 |
| 960709.1 | | | | | | | |
| AD- | XD-18359 | X61446 | CUCUGUAAGGAAGUUCCCUdTdT | 1053 | X61447 | AGGGAACUUCCUUACAGAGdTdT | 1463 |
| 960711.1 | | | | | | | |
| AD- | XD-18360 | X61448 | UCUGUAAGGAAGUUCCCAUdTdT | 1054 | X61449 | AUGGGAACUUCCUUACAGAdTdT | 1464 |
| 960712.1 | | | | | | | |
| AD- | XD-18361 | X61450 | CUGUAAGGAAGUUCCCAAUdTdT | 1055 | X61451 | AUUGGGAACUUCCUUACAGdTdT | 1465 |
| 960713.1 | | | | | | | |
| AD- | XD-18362 | X61452 | GUAAGGAAGUUCCCAACUUdTdT | 1057 | X61453 | AAGUUGGGAACUUCCUUACdTdT | 1467 |
| 960715.1 | | | | | | | |
| AD- | XD-18363 | X61454 | UAAGGAAGUUCCCAACUAUdTdT | 1058 | X61455 | AUAGUUGGGAACUUCCUUAdTdT | 1468 |
| 960716.1 | | | | | | | |
| AD- | XD-18364 | X61456 | AAGGAAGUUCCCAACUAUUdTdT | 1059 | X61457 | AAUAGUUGGGAACUUCCUUdTdT | 1469 |
| 960717.1 | | | | | | | |
| AD- | XD-18365 | X61458 | GGAAGUUCCCAACUAUAAUdTdT | 1061 | X61459 | AUUAUAGUUGGGAACUUCCdTdT | 1471 |
| 960719.1 | | | | | | | |
| AD- | XD-18366 | X61460 | GAAGUUCCCAACUAUAAAUdTdT | 1062 | X61461 | AUUUAUAGUUGGGAACUUCdTdT | 1472 |
| 960720.1 | | | | | | | |
| AD- | XD-18367 | X61462 | AAGUUCCCAACUAUAAACUdTdT | 1063 | X61463 | AGUUUAUAGUUGGGAACUUdTdT | 1473 |
| 960721.1 | | | | | | | |
| AD- | XD-18368 | X61464 | GUUCCCAACUAUAAACUUUdTdT | 1065 | X61465 | AAAGUUUAUAGUUGGGAACdTdT | 1475 |
| 960723.1 | | | | | | | |
| AD- | XD-18369 | X61466 | UUCCCAACUAUAAACUUAUdTdT | 1066 | X61467 | AUAAGUUUAUAGUUGGGAAdTdT | 1476 |
| 960724.1 | | | | | | | |
| AD- | XD-18370 | X61468 | UCCCAACUAUAAACUUAUUdTdT | 1067 | X61469 | AAUAAGUUUAUAGUUGGGAdTdT | 1477 |
| 960725.1 | | | | | | | |
| AD- | XD-18371 | X61470 | CCAACUAUAAACUUAUAAUdTdT | 1069 | X61471 | AUUAUAAGUUUAUAGUUGGdTdT | 1479 |
| 960727.1 | | | | | | | |
| AD- | XD-18372 | X61472 | CAACUAUAAACUUAUAACUdTdT | 1070 | X61473 | AGUUAUAAGUUUAUAGUUGdTdT | 1480 |
| 960728.1 | | | | | | | |
| AD- | XD-18373 | X61474 | AACUAUAAACUUAUAACCUdTdT | 1071 | X61475 | AGGUUAUAAGUUUAUAGUUdTdT | 1481 |
| 960729.1 | | | | | | | |
| AD- | XD-18374 | X61476 | CCCAGCUGUGGUCUCUGAUdTdT | 1072 | X61477 | AUCAGAGACCACAGCUGGGdTdT | 1482 |
| 960730.1 | | | | | | | |
| AD- | XD-18375 | X61478 | CAGCUGUGGUCUCUGAGAUdTdT | 1074 | X61479 | AUCUCAGAGACCACAGCUGdTdT | 1484 |
| 960732.1 | | | | | | | |
| AD- | XD-18376 | X61480 | AGCUGUGGUCUCUGAGAGUdTdT | 1075 | X61481 | ACUCUCAGAGACCACAGCUdTdT | 1485 |
| 960733.1 | | | | | | | |
| AD- | XD-18377 | X61482 | GCUGUGGUCUCUGAGAGAUdTdT | 1076 | X61483 | AUCUCUCAGAGACCACAGCdTdT | 1486 |
| 960734.1 | | | | | | | |
| AD- | XD-18378 | X61484 | UGUGGUCUCUGAGAGACUUdTdT | 1078 | X61485 | AAGUCUCUCAGAGACCACAdTdT | 1488 |
| 960736.1 | | | | | | | |
| AD- | XD-18379 | X61486 | GUGGUCUCUGAGAGACUGUdTdT | 1079 | X61487 | ACAGUCUCUCAGAGACCACdTdT | 1489 |
| 960737.1 | | | | | | | |
| AD- | XD-18380 | X61488 | UGGUCUCUGAGAGACUGAUdTdT | 1080 | X61489 | AUCAGUCUCUCAGAGACCAdTdT | 1490 |
| 960738.1 | | | | | | | |
| AD- | XD-18381 | X61490 | GUCUCUGAGAGACUGAAGUdTdT | 1082 | X61491 | ACUUCAGUCUCUCAGAGACdTdT | 1492 |
| 960740.1 | | | | | | | |
| AD- | XD-18382 | X61492 | UCUCUGAGAGACUGAAGAUdTdT | 1083 | X61493 | AUCUUCAGUCUCUCAGAGAdTdT | 1493 |
| 960741.1 | | | | | | | |
| AD- | XD-18383 | X61494 | CUCUGAGAGACUGAAGAUUdTdT | 1084 | X61495 | AAUCUUCAGUCUCUCAGAGdTdT | 1494 |
| 960742.1 | | | | | | | |
| AD- | XD-18384 | X61496 | CUGAGAGACUGAAGAUUCUdTdT | 1086 | X61497 | AGAAUCUUCAGUCUCUCAGdTdT | 1496 |
| 960744.1 | | | | | | | |
| AD- | XD-18385 | X61498 | UGAGAGACUGAAGAUUCGUdTdT | 1087 | X61499 | ACGAAUCUUCAGUCUCUCAdTdT | 1497 |
| 960745.1 | | | | | | | |
| AD- | XD-18386 | X61500 | GAGAGACUGAAGAUUCGAUdTdT | 1088 | X61501 | AUCGAAUCUUCAGUCUCUCdTdT | 1498 |
| 960746.1 | | | | | | | |
| AD- | XD-18387 | X61502 | GAGACUGAAGAUUCGAGGUdTdT | 1090 | X61503 | ACCUCGAAUCUUCAGUCUCdTdT | 1500 |
| 960748.1 | | | | | | | |
| AD- | XD-18388 | X61504 | AGACUGAAGAUUCGAGGCUdTdT | 1091 | X61505 | AGCCUCGAAUCUUCAGUCUdTdT | 1501 |
| 960749.1 | | | | | | | |
| AD- | XD-18389 | X61506 | GACUGAAGAUUCGAGGCUUdTdT | 1092 | X61507 | AAGCCUCGAAUCUUCAGUCdTdT | 1502 |
| 960750.1 | | | | | | | |
| AD- | XD-18390 | X61508 | CUGAAGAUUCGAGGCUCCUdTdT | 1094 | X61509 | AGGAGCCUCGAAUCUUCAGdTdT | 1504 |
| 960752.1 | | | | | | | |
| AD- | XD-18391 | X61510 | UGAAGAUUCGAGGCUCCCUdTdT | 1095 | X61511 | AGGGAGCCUCGAAUCUUCAdTdT | 1505 |
| 960753.1 | | | | | | | |
| AD- | XD-18392 | X61512 | GAAGAUUCGAGGCUCCCUUdTdT | 1096 | X61513 | AAGGGAGCCUCGAAUCUUCdTdT | 1506 |
| 960754.1 | | | | | | | |
| AD- | XD-18393 | X61514 | AGAUUCGAGGCUCCCUGGUdTdT | 1098 | X61515 | ACCAGGGAGCCUCGAAUCUdTdT | 1508 |
| 960756.1 | | | | | | | |
| AD- | XD-18394 | X61516 | GAUUCGAGGCUCCCUGGCUdTdT | 1099 | X61517 | AGCCAGGGAGCCUCGAAUCdTdT | 1509 |
| 960757.1 | | | | | | | |
| AD- | XD-18395 | X61518 | AUUCGAGGCUCCCUGGCCUdTdT | 1100 | X61519 | AGGCCAGGGAGCCUCGAAUdTdT | 1510 |
| 960758.1 | | | | | | | |
| AD- | XD-18396 | X61520 | UCGAGGCUCCCUGGCCAGUdTdT | 1102 | X61521 | ACUGGCCAGGGAGCCUCGAdTdT | 1512 |
| 960760.1 | | | | | | | |
| AD- | XD-18397 | X61522 | CUGGCCAGGGCAGCCCUUUdTdT | 1103 | X61523 | AAAGGGCUGCCCUGGCCAGdTdT | 1513 |
| 960761.1 | | | | | | | |
| AD- | XD-18398 | X61524 | UGGCCAGGGCAGCCCUUCUdTdT | 1104 | X61525 | AGAAGGGCUGCCCUGGCCAdTdT | 1514 |
| 960762.1 | | | | | | | |
| AD- | XD-18399 | X61526 | GGCCAGGGCAGCCCUUCAUdTdT | 1105 | X61527 | AUGAAGGGCUGCCCUGGCCdTdT | 1515 |
| 960763.1 | | | | | | | |
| AD- | XD-18400 | X61528 | CCAGGGCAGCCCUUCAGGUdTdT | 1107 | X61529 | ACCUGAAGGGCUGCCCUGGdTdT | 1517 |
| 960765.1 | | | | | | | |
| AD- | XD-18401 | X61530 | CAGGGCAGCCCUUCAGGAUdTdT | 1108 | X61531 | AUCCUGAAGGGCUGCCCUGdTdT | 1518 |
| 960766.1 | | | | | | | |
| AD- | XD-18402 | X61532 | AGGGCAGCCCUUCAGGAGUdTdT | 1109 | X61533 | ACUCCUGAAGGGCUGCCCUdTdT | 1519 |
| 960767.1 | | | | | | | |
| AD- | XD-18403 | X61534 | GGCAGCCCUUCAGGAGCUUdTdT | 1111 | X61535 | AAGCUCCUGAAGGGCUGCCdTdT | 1521 |
| 960769.1 | | | | | | | |
| AD- | XD-18404 | X61536 | GCAGCCCUUCAGGAGCUCUdTdT | 1112 | X61537 | AGAGCUCCUGAAGGGCUGCdTdT | 1522 |
| 960770.1 | | | | | | | |
| AD- | XD-18405 | X61538 | CAGCCCUUCAGGAGCUCCUdTdT | 1113 | X61539 | AGGAGCUCCUGAAGGGCUGdTdT | 1523 |
| 960771.1 | | | | | | | |
| AD- | XD-18406 | X61540 | GCCCUUCAGGAGCUCCUUUdTdT | 1115 | X61541 | AAAGGAGCUCCUGAAGGGCdTdT | 1525 |
| 960773.1 | | | | | | | |
| AD- | XD-18407 | X61542 | CCCUUCAGGAGCUCCUUAUdTdT | 1116 | X61543 | AUAAGGAGCUCCUGAAGGGdTdT | 1526 |
| 960774.1 | | | | | | | |
| AD- | XD-18408 | X61544 | CCUUCAGGAGCUCCUUAGUdTdT | 1117 | X61545 | ACUAAGGAGCUCCUGAAGGdTdT | 1527 |
| 960775.1 | | | | | | | |
| AD- | XD-18409 | X61546 | UUCAGGAGCUCCUUAGUAUdTdT | 1119 | X61547 | AUACUAAGGAGCUCCUGAAdTdT | 1529 |
| 960777.1 | | | | | | | |
| AD- | XD-18410 | X61548 | UCAGGAGCUCCUUAGUAAUdTdT | 1120 | X61549 | AUUACUAAGGAGCUCCUGAdTdT | 1530 |
| 960778.1 | | | | | | | |
| AD- | XD-18411 | X61550 | CAGGAGCUCCUUAGUAAAUdTdT | 1121 | X61551 | AUUUACUAAGGAGCUCCUGdTdT | 1531 |
| 960779.1 | | | | | | | |
| AD- | XD-18412 | X61552 | GGAGCUCCUUAGUAAAGGUdTdT | 1123 | X61553 | ACCUUUACUAAGGAGCUCCdTdT | 1533 |
| 960781.1 | | | | | | | |
| AD- | XD-18413 | X61554 | GAGCUCCUUAGUAAAGGAUdTdT | 1124 | X61555 | AUCCUUUACUAAGGAGCUCdTdT | 1534 |
| 960782.1 | | | | | | | |
| AD- | XD-18414 | X61556 | AGCUCCUUAGUAAAGGACUdTdT | 1125 | X61557 | AGUCCUUUACUAAGGAGCUdTdT | 1535 |
| 960783.1 | | | | | | | |
| AD- | XD-18415 | X61558 | CUCCUUAGUAAAGGACUUUdTdT | 1127 | X61559 | AAAGUCCUUUACUAAGGAGdTdT | 1537 |
| 960785.1 | | | | | | | |
| AD- | XD-18416 | X61560 | UCCUUAGUAAAGGACUUAUdTdT | 1128 | X61561 | AUAAGUCCUUUACUAAGGAdTdT | 1538 |
| 960786.1 | | | | | | | |
| AD- | XD-18417 | X61562 | CCUUAGUAAAGGACUUAUUdTdT | 1129 | X61563 | AAUAAGUCCUUUACUAAGGdTdT | 1539 |
| 960787.1 | | | | | | | |
| AD- | XD-18418 | X61564 | UUAGUAAAGGACUUAUCAUdTdT | 1131 | X61565 | AUGAUAAGUCCUUUACUAAdTdT | 1541 |
| 960789.1 | | | | | | | |
| AD- | XD-18419 | X61566 | UAGUAAAGGACUUAUCAAUdTdT | 1132 | X61567 | AUUGAUAAGUCCUUUACUAdTdT | 1542 |
| 960790.1 | | | | | | | |
| AD- | XD-18420 | X61568 | AGUAAAGGACUUAUCAAAUdTdT | 1133 | X61569 | AUUUGAUAAGUCCUUUACUdTdT | 1543 |
| 960791.1 | | | | | | | |
| AD- | XD-18421 | X61570 | UAAAGGACUUAUCAAACUUdTdT | 1135 | X61571 | AAGUUUGAUAAGUCCUUUAdTdT | 1545 |
| 960793.1 | | | | | | | |
| AD- | XD-18422 | X61572 | AAAGGACUUAUCAAACUGUdTdT | 1136 | X61573 | ACAGUUUGAUAAGUCCUUUdTdT | 1546 |
| 960794.1 | | | | | | | |
| AD- | XD-18423 | X61574 | AAGGACUUAUCAAACUGGUdTdT | 1137 | X61575 | ACCAGUUUGAUAAGUCCUUdTdT | 1547 |
| 960795.1 | | | | | | | |
| AD- | XD-18424 | X61576 | GGACUUAUCAAACUGGUUUdTdT | 1139 | X61577 | AAACCAGUUUGAUAAGUCCdTdT | 1549 |
| 960797.1 | | | | | | | |
| AD- | XD-18425 | X61578 | GACUUAUCAAACUGGUUUUdTdT | 1140 | X61579 | AAAACCAGUUUGAUAAGUCdTdT | 1550 |
| 960798.1 | | | | | | | |
| AD- | XD-18426 | X61580 | ACUUAUCAAACUGGUUUCUdTdT | 1141 | X61581 | AGAAACCAGUUUGAUAAGUdTdT | 1551 |
| 960799.1 | | | | | | | |
| AD- | XD-18427 | X61582 | UUAUCAAACUGGUUUCAAUdTdT | 1143 | X61583 | AUUGAAACCAGUUUGAUAAdTdT | 1553 |
| 960801.1 | | | | | | | |
| AD- | XD-18428 | X61584 | UAUCAAACUGGUUUCAAAUdTdT | 1144 | X61585 | AUUUGAAACCAGUUUGAUAdTdT | 1554 |
| 960802.1 | | | | | | | |
| AD- | XD-18429 | X61586 | AUCAAACUGGUUUCAAAGUdTdT | 1145 | X61587 | ACUUUGAAACCAGUUUGAUdTdT | 1555 |
| 960803.1 | | | | | | | |
| AD- | XD-18430 | X61588 | UCAAACUGGUUUCAAAGCUdTdT | 1146 | X61589 | AGCUUUGAAACCAGUUUGAdTdT | 1556 |
| 960804.1 | | | | | | | |
| AD- | XD-18431 | X61590 | AAACUGGUUUCAAAGCACUdTdT | 1148 | X61591 | AGUGCUUUGAAACCAGUUUdTdT | 1558 |
| 960806.1 | | | | | | | |
| AD- | XD-18432 | X61592 | AACUGGUUUCAAAGCACAUdTdT | 1149 | X61593 | AUGUGCUUUGAAACCAGUUdTdT | 1559 |
| 960807.1 | | | | | | | |
| AD- | XD-18433 | X61594 | ACUGGUUUCAAAGCACAGUdTdT | 1150 | X61595 | ACUGUGCUUUGAAACCAGUdTdT | 1560 |
| 960808.1 | | | | | | | |
| AD- | XD-18434 | X61596 | UGGUUUCAAAGCACAGAGUdTdT | 1152 | X61597 | ACUCUGUGCUUUGAAACCAdTdT | 1562 |
| 960810.1 | | | | | | | |
| AD- | XD-18435 | X61598 | GGUUUCAAAGCACAGAGCUdTdT | 1153 | X61599 | AGCUCUGUGCUUUGAAACCdTdT | 1563 |
| 960811.1 | | | | | | | |
| AD- | XD-18436 | X61600 | GUUUCAAAGCACAGAGCUUdTdT | 1154 | X61601 | AAGCUCUGUGCUUUGAAACdTdT | 1564 |
| 960812.1 | | | | | | | |
| AD- | XD-18437 | X61602 | UUCAAAGCACAGAGCUCAUdTdT | 1156 | X61603 | AUGAGCUCUGUGCUUUGAAdTdT | 1566 |
| 960814.1 | | | | | | | |
| AD- | XD-18438 | X61604 | UCAAAGCACAGAGCUCAAUdTdT | 1157 | X61605 | AUUGAGCUCUGUGCUUUGAdTdT | 1567 |
| 960815.1 | | | | | | | |
| AD- | XD-18439 | X61606 | CAAAGCACAGAGCUCAAGUdTdT | 1158 | X61607 | ACUUGAGCUCUGUGCUUUGdTdT | 1568 |
| 960816.1 | | | | | | | |
| AD- | XD-18440 | X61608 | AAGCACAGAGCUCAAGUAUdTdT | 1160 | X61609 | AUACUUGAGCUCUGUGCUUdTdT | 1570 |
| 960818.1 | | | | | | | |
| AD- | XD-18441 | X61610 | AGCACAGAGCUCAAGUAAUdTdT | 1161 | X61611 | AUUACUUGAGCUCUGUGCUdTdT | 1571 |
| 960819.1 | | | | | | | |
| AD- | XD-18442 | X61612 | GCACAGAGCUCAAGUAAUUdTdT | 1162 | X61613 | AAUUACUUGAGCUCUGUGCdTdT | 1572 |
| 960820.1 | | | | | | | |
| AD- | XD-18443 | X61614 | ACAGAGCUCAAGUAAUUUUdTdT | 1164 | X61615 | AAAAUUACUUGAGCUCUGUdTdT | 1574 |
| 960822.1 | | | | | | | |
| AD- | XD-18444 | X61616 | CAGAGCUCAAGUAAUUUAUdTdT | 1165 | X61617 | AUAAAUUACUUGAGCUCUGdTdT | 1575 |
| 960823.1 | | | | | | | |
| AD- | XD-18445 | X61618 | AGAGCUCAAGUAAUUUACUdTdT | 1166 | X61619 | AGUAAAUUACUUGAGCUCUdTdT | 1576 |
| 960824.1 | | | | | | | |
| AD- | XD-18446 | X61620 | AGCUCAAGUAAUUUACACUdTdT | 1168 | X61621 | AGUGUAAAUUACUUGAGCUdTdT | 1578 |
| 960826.1 | | | | | | | |
| AD- | XD-18447 | X61622 | GCUCAAGUAAUUUACACCUdTdT | 1169 | X61623 | AGGUGUAAAUUACUUGAGCdTdT | 1579 |
| 960827.1 | | | | | | | |
| AD- | XD-18448 | X61624 | CUCAAGUAAUUUACACCAUdTdT | 1170 | X61625 | AUGGUGUAAAUUACUUGAGdTdT | 1580 |
| 960828.1 | | | | | | | |
| AD- | XD-18449 | X61626 | CAAGUAAUUUACACCAGAUdTdT | 1172 | X61627 | AUCUGGUGUAAAUUACUUGdTdT | 1582 |
| 960830.1 | | | | | | | |
| AD- | XD-18450 | X61628 | AAGUAAUUUACACCAGAAUdTdT | 1173 | X61629 | AUUCUGGUGUAAAUUACUUdTdT | 1583 |
| 960831.1 | | | | | | | |
| AD- | XD-18451 | X61630 | AGUAAUUUACACCAGAAAUdTdT | 1174 | X61631 | AUUUCUGGUGUAAAUUACUdTdT | 1584 |
| 960832.1 | | | | | | | |
| AD- | XD-18452 | X61632 | UAAUUUACACCAGAAAUAUdTdT | 1176 | X61633 | AUAUUUCUGGUGUAAAUUAdTdT | 1586 |
| 960834.1 | | | | | | | |
| AD- | XD-18453 | X61634 | AAUUUACACCAGAAAUACUdTdT | 1177 | X61635 | AGUAUUUCUGGUGUAAAUUdTdT | 1587 |
| 960835.1 | | | | | | | |
| AD- | XD-18454 | X61636 | AUUUACACCAGAAAUACCUdTdT | 1178 | X61637 | AGGUAUUUCUGGUGUAAAUdTdT | 1588 |
| 960836.1 | | | | | | | |
| AD- | XD-18455 | X61638 | UUUACACCAGAAAUACCAUdTdT | 1179 | X61639 | AUGGUAUUUCUGGUGUAAAdTdT | 1589 |
| 960837.1 | | | | | | | |
| AD- | XD-18456 | X61640 | UACACCAGAAAUACCAAGUdTdT | 1181 | X61641 | ACUUGGUAUUUCUGGUGUAdTdT | 1591 |
| 960839.1 | | | | | | | |
| AD- | XD-18457 | X61642 | ACACCAGAAAUACCAAGGUdTdT | 1182 | X61643 | ACCUUGGUAUUUCUGGUGUdTdT | 1592 |
| 960840.1 | | | | | | | |
| AD- | XD-18458 | X61644 | CACCAGAAAUACCAAGGGUdTdT | 1183 | X61645 | ACCCUUGGUAUUUCUGGUGdTdT | 1593 |
| 960841.1 | | | | | | | |
| AD- | XD-18459 | X61646 | CCAGAAAUACCAAGGGUGUdTdT | 1185 | X61647 | ACACCCUUGGUAUUUCUGGdTdT | 1595 |
| 960843.1 | | | | | | | |
| AD- | XD-18460 | X61648 | CAGAAAUACCAAGGGUGGUdTdT | 1186 | X61649 | ACCACCCUUGGUAUUUCUGdTdT | 1596 |
| 960844.1 | | | | | | | |
| AD- | XD-18461 | X61650 | AGAAAUACCAAGGGUGGAUdTdT | 1187 | X61651 | AUCCACCCUUGGUAUUUCUdTdT | 1597 |
| 960845.1 | | | | | | | |
| AD- | XD-18462 | X61652 | AAAUACCAAGGGUGGAGAUdTdT | 1189 | X61653 | AUCUCCACCCUUGGUAUUUdTdT | 1599 |
| 960847.1 | | | | | | | |
| AD- | XD-18463 | X61654 | AAUACCAAGGGUGGAGAUUdTdT | 1190 | X61655 | AAUCUCCACCCUUGGUAUUdTdT | 1600 |
| 960848.1 | | | | | | | |
| AD- | XD-18464 | X61656 | AUACCAAGGGUGGAGAUGUdTdT | 1191 | X61657 | ACAUCUCCACCCUUGGUAUdTdT | 1601 |
| 960849.1 | | | | | | | |
| AD- | XD-18465 | X61658 | ACCAAGGGUGGAGAUGCUUdTdT | 1193 | X61659 | AAGCAUCUCCACCCUUGGUdTdT | 1603 |
| 960851.1 | | | | | | | |
| AD- | XD-18466 | X61660 | CCAAGGGUGGAGAUGCUCUdTdT | 1194 | X61661 | AGAGCAUCUCCACCCUUGGdTdT | 1604 |
| 960852.1 | | | | | | | |
| AD- | XD-18467 | X61662 | CAAGGGUGGAGAUGCUCCUdTdT | 1195 | X61663 | AGGAGCAUCUCCACCCUUGdTdT | 1605 |
| 960853.1 | | | | | | | |
| AD- | XD-18468 | X61664 | AGGGUGGAGAUGCUCCAGUdTdT | 1197 | X61665 | ACUGGAGCAUCUCCACCCUdTdT | 1607 |
| 960855.1 | | | | | | | |
| AD- | XD-18469 | X61666 | GGGUGGAGAUGCUCCAGCUdTdT | 1198 | X61667 | AGCUGGAGCAUCUCCACCCdTdT | 1608 |
| 960856.1 | | | | | | | |
| AD- | XD-18470 | X61668 | GGUGGAGAUGCUCCAGCUUdTdT | 1199 | X61669 | AAGCUGGAGCAUCUCCACCdTdT | 1609 |
| 960857.1 | | | | | | | |
| AD- | XD-18471 | X61670 | UGGAGAUGCUCCAGCUGCUdTdT | 1201 | X61671 | AGCAGCUGGAGCAUCUCCAdTdT | 1611 |
| 960859.1 | | | | | | | |
| AD- | XD-18472 | X61672 | GGAGAUGCUCCAGCUGCUUdTdT | 1202 | X61673 | AAGCAGCUGGAGCAUCUCCdTdT | 1612 |
| 960860.1 | | | | | | | |
| AD- | XD-18473 | X61674 | GAGAUGCUCCAGCUGCUGUdTdT | 1203 | X61675 | ACAGCAGCUGGAGCAUCUCdTdT | 1613 |
| 960861.1 | | | | | | | |
| AD- | XD-18474 | X61676 | GAUGCUCCAGCUGCUGGUUdTdT | 1205 | X61677 | AACCAGCAGCUGGAGCAUCdTdT | 1615 |
| 960863.1 | | | | | | | |
| AD- | XD-18475 | X61678 | AUGCUCCAGCUGCUGGUGUdTdT | 1206 | X61679 | ACACCAGCAGCUGGAGCAUdTdT | 1616 |
| 960864.1 | | | | | | | |
| AD- | XD-18476 | X61680 | UGCUCCAGCUGCUGGUGAUdTdT | 1207 | X61681 | AUCACCAGCAGCUGGAGCAdTdT | 1617 |
| 960865.1 | | | | | | | |
| AD- | XD-18477 | X61682 | CUCCAGCUGCUGGUGAAGUdTdT | 1209 | X61683 | ACUUCACCAGCAGCUGGAGdTdT | 1619 |
| 960867.1 | | | | | | | |
| AD- | XD-18478 | X61684 | UCCAGCUGCUGGUGAAGAUdTdT | 1210 | X61685 | AUCUUCACCAGCAGCUGGAdTdT | 1620 |
| 960868.1 | | | | | | | |
| AD- | XD-18479 | X61686 | CCAGCUGCUGGUGAAGAUUdTdT | 1211 | X61687 | AAUCUUCACCAGCAGCUGGdTdT | 1621 |
| 960869.1 | | | | | | | |
| AD- | XD-18480 | X61688 | AGCUGCUGGUGAAGAUGCUdTdT | 1213 | X61689 | AGCAUCUUCACCAGCAGCUdTdT | 1623 |
| 960871.1 | | | | | | | |
| AD- | XD-18481 | X61690 | GCUGCUGGUGAAGAUGCAUdTdT | 1214 | X61691 | AUGCAUCUUCACCAGCAGCdTdT | 1624 |
| 960872.1 | | | | | | | |
| AD- | XD-18482 | X61692 | CUGCUGGUGAAGAUGCAUUdTdT | 1215 | X61693 | AAUGCAUCUUCACCAGCAGdTdT | 1625 |
| 960873.1 | | | | | | | |
| AD- | XD-18483 | X61694 | GCUGGUGAAGAUGCAUGAUdTdT | 1217 | X61695 | AUCAUGCAUCUUCACCAGCdTdT | 1627 |
| 960875.1 | | | | | | | |
| AD- | XD-18484 | X61696 | CUGGUGAAGAUGCAUGAAUdTdT | 1218 | X61697 | AUUCAUGCAUCUUCACCAGdTdT | 1628 |
| 960876.1 | | | | | | | |
| AD- | XD-18485 | X61698 | UGGUGAAGAUGCAUGAAUUdTdT | 1219 | X61699 | AAUUCAUGCAUCUUCACCAdTdT | 1629 |
| 960877.1 | | | | | | | |
| AD- | XD-18486 | X61700 | GUGAAGAUGCAUGAAUAGUdTdT | 1221 | X61701 | ACUAUUCAUGCAUCUUCACdTdT | 1631 |
| 960879.1 | | | | | | | |
| AD- | XD-18487 | X61702 | UGAAGAUGCAUGAAUAGGUdTdT | 1222 | X61703 | ACCUAUUCAUGCAUCUUCAdTdT | 1632 |
| 960880.1 | | | | | | | |
| AD- | XD-18488 | X61704 | GAAGAUGCAUGAAUAGGUUdTdT | 1223 | X61705 | AACCUAUUCAUGCAUCUUCdTdT | 1633 |
| 960881.1 | | | | | | | |
| AD- | XD-18489 | X61706 | AAGAUGCAUGAAUAGGUCUdTdT | 1224 | X61707 | AGACCUAUUCAUGCAUCUUdTdT | 1634 |
| 960882.1 | | | | | | | |
| AD- | XD-18490 | X61708 | GAUGCAUGAAUAGGUCCAUdTdT | 1226 | X61709 | AUGGACCUAUUCAUGCAUCdTdT | 1636 |
| 960884.1 | | | | | | | |
| AD- | XD-18491 | X61710 | AUGCAUGAAUAGGUCCAAUdTdT | 1227 | X61711 | AUUGGACCUAUUCAUGCAUdTdT | 1637 |
| 960885.1 | | | | | | | |
| AD- | XD-18492 | X61712 | UGCAUGAAUAGGUCCAACUdTdT | 1228 | X61713 | AGUUGGACCUAUUCAUGCAdTdT | 1638 |
| 960886.1 | | | | | | | |
| AD- | XD-18493 | X61714 | CAUGAAUAGGUCCAACCAUdTdT | 1230 | X61715 | AUGGUUGGACCUAUUCAUGdTdT | 1640 |
| 960888.1 | | | | | | | |
| AD- | XD-18494 | X61716 | AUGAAUAGGUCCAACCAGUdTdT | 1231 | X61717 | ACUGGUUGGACCUAUUCAUdTdT | 1641 |
| 960889.1 | | | | | | | |
| AD- | XD-18495 | X61718 | UGAAUAGGUCCAACCAGCUdTdT | 1232 | X61719 | AGCUGGUUGGACCUAUUCAdTdT | 1642 |
| 960890.1 | | | | | | | |
| AD- | XD-18496 | X61720 | AAUAGGUCCAACCAGCUGUdTdT | 1234 | X61721 | ACAGCUGGUUGGACCUAUUdTdT | 1644 |
| 960892.1 | | | | | | | |
| AD- | XD-18497 | X61722 | AUAGGUCCAACCAGCUGUUdTdT | 1235 | X61723 | AACAGCUGGUUGGACCUAUdTdT | 1645 |
| 960893.1 | | | | | | | |
| AD- | XD-18498 | X61724 | UAGGUCCAACCAGCUGUAUdTdT | 1236 | X61725 | AUACAGCUGGUUGGACCUAdTdT | 1646 |
| 960894.1 | | | | | | | |
| AD- | XD-18499 | X61726 | AGGUCCAACCAGCUGUACUdTdT | 1237 | X61727 | AGUACAGCUGGUUGGACCUdTdT | 1647 |
| 960895.1 | | | | | | | |
| AD- | XD-18500 | X61728 | GGUCCAACCAGCUGUACAUdTdT | 1238 | X61729 | AUGUACAGCUGGUUGGACCdTdT | 1648 |
| 960896.1 | | | | | | | |
| AD- | XD-18501 | X61730 | GUCCAACCAGCUGUACAUUdTdT | 1239 | X61731 | AAUGUACAGCUGGUUGGACdTdT | 1649 |
| 960897.1 | | | | | | | |
| AD- | XD-18502 | X61732 | UCCAACCAGCUGUACAUUUdTdT | 1240 | X61733 | AAAUGUACAGCUGGUUGGAdTdT | 1650 |
| 960898.1 | | | | | | | |
| AD- | XD-18503 | X61734 | CCAACCAGCUGUACAUUUUdTdT | 1241 | X61735 | AAAAUGUACAGCUGGUUGGdTdT | 1651 |
| 960899.1 | | | | | | | |
| AD- | XD-18504 | X61736 | CAACCAGCUGUACAUUUGUdTdT | 1242 | X61737 | ACAAAUGUACAGCUGGUUGdTdT | 1652 |
| 960900.1 | | | | | | | |
| AD- | XD-18505 | X61738 | AACCAGCUGUACAUUUGGUdTdT | 1243 | X61739 | ACCAAAUGUACAGCUGGUUdTdT | 1653 |
| 960901.1 | | | | | | | |
| AD- | XD-18506 | X61740 | ACCAGCUGUACAUUUGGAUdTdT | 1244 | X61741 | AUCCAAAUGUACAGCUGGUdTdT | 1654 |
| 960902.1 | | | | | | | |
| AD- | XD-18507 | X61742 | CCAGCUGUACAUUUGGAAUdTdT | 1245 | X61743 | AUUCCAAAUGUACAGCUGGdTdT | 1655 |
| 960903.1 | | | | | | | |
| AD- | XD-18508 | X61744 | CAGCUGUACAUUUGGAAAUdTdT | 1246 | X61745 | AUUUCCAAAUGUACAGCUGdTdT | 1656 |
| 960904.1 | | | | | | | |
| AD- | XD-18509 | X61746 | AGCUGUACAUUUGGAAAAUdTdT | 1247 | X61747 | AUUUUCCAAAUGUACAGCUdTdT | 1657 |
| 960905.1 | | | | | | | |
| AD- | XD-18510 | X61748 | GCUGUACAUUUGGAAAAAUdTdT | 1248 | X61749 | AUUUUUCCAAAUGUACAGCdTdT | 1658 |
| 960906.1 | | | | | | | |
| AD- | XD-18511 | X61750 | CUGUACAUUUGGAAAAAUUdTdT | 1249 | X61751 | AAUUUUUCCAAAUGUACAGdTdT | 1659 |
| 960907.1 | | | | | | | |
| AD- | XD-18512 | X61752 | UGUACAUUUGGAAAAAUAUdTdT | 1250 | X61753 | AUAUUUUUCCAAAUGUACAdTdT | 1660 |
| 960908.1 | | | | | | | |
| AD- | XD-18513 | X61754 | GUACAUUUGGAAAAAUAAUdTdT | 1251 | X61755 | AUUAUUUUUCCAAAUGUACdTdT | 1661 |
| 960909.1 | | | | | | | |
| AD- | XD-18514 | X61756 | CAUUUGGAAAAAUAAAACUdTdT | 1252 | X61757 | AGUUUUAUUUUUCCAAAUGdTdT | 1662 |
| 960910.1 | | | | | | | |

TABLE 13
RPS25 Unmodified Duplex Sequences

| | Start Site | End Site | | | |
|---|---|---|---|---|---|
| Duplex | in | in | Sense Sequence | Antisense Sequence | Target Sequence |
| Name | NM_001028.3 | NM_00128.3 | 5′ to 3′ | 5′ to 3′ | 5′ to 3′ |
| AD- | 56 | 78 | CAAUGCCGCCUAAGGACGACA | UGUCGUCCUUAGGCGGCAUUGCG | CGCAATGCCGCCTAAGGACGACA |
| 1381680 | | | | | |
| AD- | 57 | 79 | AAUGCCGCCUAAGGACGACAA | UUGUCGUCCUUAGGCGGCAUUGC | GCAATGCCGCCTAAGGACGACAA |
| 1381681 | | | | | |
| AD- | 59 | 81 | UGCCGCCUAAGGACGACAAGA | UCUUGUCGUCCUUAGGCGGCAUU | AATGCCGCCTAAGGACGACAAGA |
| 1381682 | | | | | |
| AD- | 60 | 82 | GCCGCCUAAGGACGACAAGAA | UUCUUGUCGUCCUUAGGCGGCAU | ATGCCGCCTAAGGACGACAAGAA |
| 1381683 | | | | | |
| AD- | 61 | 83 | CCGCCUAAGGACGACAAGAAG | CUUCUUGUCGUCCUUAGGCGGCA | TGCCGCCTAAGGACGACAAGAAG |
| 1381684 | | | | | |
| AD- | 63 | 85 | GCCUAAGGACGACAAGAAGAA | UUCUUCUUGUCGUCCUUAGGCGG | CCGCCTAAGGACGACAAGAAGAA |
| 1381685 | | | | | |
| AD- | 64 | 86 | CCUAAGGACGACAAGAAGAAG | CUUCUUCUUGUCGUCCUUAGGCG | CGCCTAAGGACGACAAGAAGAAG |
| 1381686 | | | | | |
| AD- | 65 | 87 | CUAAGGACGACAAGAAGAAGA | UCUUCUUCUUGUCGUCCUUAGGC | GCCTAAGGACGACAAGAAGAAGA |
| 1381687 | | | | | |
| AD- | 67 | 89 | AAGGACGACAAGAAGAAGAAG | CUUCUUCUUCUUGUCGUCCUUAG | CTAAGGACGACAAGAAGAAGAAG |
| 1381688 | | | | | |
| AD- | 68 | 90 | AGGACGACAAGAAGAAGAAGG | CCUUCUUCUUCUUGUCGUCCUUA | TAAGGACGACAAGAAGAAGAAGG |
| 1381689 | | | | | |
| AD- | 69 | 91 | GGACGACAAGAAGAAGAAGGA | UCCUUCUUCUUCUUGUCGUCCUU | AAGGACGACAAGAAGAAGAAGGA |
| 1381690 | | | | | |
| AD- | 71 | 93 | ACGACAAGAAGAAGAAGGACG | CGUCCUUCUUCUUCUUGUCGUCC | GGACGACAAGAAGAAGAAGGACG |
| 1381691 | | | | | |
| AD- | 72 | 94 | CGACAAGAAGAAGAAGGACGC | GCGUCCUUCUUCUUCUUGUCGUC | GACGACAAGAAGAAGAAGGACGC |
| 1381692 | | | | | |
| AD- | 73 | 95 | GACAAGAAGAAGAAGGACGCU | AGCGUCCUUCUUCUUCUUGUCGU | ACGACAAGAAGAAGAAGGACGCT |
| 1381693 | | | | | |
| AD- | 75 | 97 | CAAGAAGAAGAAGGACGCUGG | CCAGCGUCCUUCUUCUUCUUGUC | GACAAGAAGAAGAAGGACGCTGG |
| 1381694 | | | | | |
| AD- | 76 | 98 | AAGAAGAAGAAGGACGCUGGA | UCCAGCGUCCUUCUUCUUCUUGU | ACAAGAAGAAGAAGGACGCTGGA |
| 1381695 | | | | | |
| AD- | 77 | 99 | AGAAGAAGAAGGACGCUGGAA | UUCCAGCGUCCUUCUUCUUCUUG | CAAGAAGAAGAAGGACGCTGGAA |
| 1381696 | | | | | |
| AD- | 78 | 100 | GAAGAAGAAGGACGCUGGAAA | UUUCCAGCGUCCUUCUUCUUCUU | AAGAAGAAGAAGGACGCTGGAAA |
| 1381697 | | | | | |
| AD- | 80 | 102 | AGAAGAAGGACGCUGGAAAGU | ACUUUCCAGCGUCCUUCUUCUUC | GAAGAAGAAGGACGCTGGAAAGT |
| 1381698 | | | | | |
| AD- | 81 | 103 | GAAGAAGGACGCUGGAAAGUC | GACUUUCCAGCGUCCUUCUUCUU | AAGAAGAAGGACGCTGGAAAGTC |
| 1381699 | | | | | |
| AD- | 82 | 104 | AAGAAGGACGCUGGAAAGUCG | CGACUUUCCAGCGUCCUUCUUCU | AGAAGAAGGACGCTGGAAAGTCG |
| 1381700 | | | | | |
| AD- | 84 | 106 | GAAGGACGCUGGAAAGUCGGC | GCCGACUUUCCAGCGUCCUUCUU | AAGAAGGACGCTGGAAAGTCGGC |
| 1381701 | | | | | |
| AD- | 85 | 107 | AAGGACGCUGGAAAGUCGGCC | GGCCGACUUUCCAGCGUCCUUCU | AGAAGGACGCTGGAAAGTCGGCC |
| 1381702 | | | | | |
| AD- | 86 | 108 | AGGACGCUGGAAAGUCGGCCA | UGGCCGACUUUCCAGCGUCCUUC | GAAGGACGCTGGAAAGTCGGCCA |
| 1381703 | | | | | |
| AD- | 88 | 110 | GACGCUGGAAAGUCGGCCAAG | CUUGGCCGACUUUCCAGCGUCCU | AGGACGCTGGAAAGTCGGCCAAG |
| 1381704 | | | | | |
| AD- | 89 | 111 | ACGCUGGAAAGUCGGCCAAGA | UCUUGGCCGACUUUCCAGCGUCC | GGACGCTGGAAAGTCGGCCAAGA |
| 1381705 | | | | | |
| AD- | 90 | 112 | CGCUGGAAAGUCGGCCAAGAA | UUCUUGGCCGACUUUCCAGCGUC | GACGCTGGAAAGTCGGCCAAGAA |
| 1381706 | | | | | |
| AD- | 92 | 114 | CUGGAAAGUCGGCCAAGAAAG | CUUUCUUGGCCGACUUUCCAGCG | CGCTGGAAAGTCGGCCAAGAAAG |
| 1381707 | | | | | |
| AD- | 93 | 115 | UGGAAAGUCGGCCAAGAAAGA | UCUUUCUUGGCCGACUUUCCAGC | GCTGGAAAGTCGGCCAAGAAAGA |
| 1381708 | | | | | |
| AD- | 94 | 116 | GGAAAGUCGGCCAAGAAAGAC | GUCUUUCUUGGCCGACUUUCCAG | CTGGAAAGTCGGCCAAGAAAGAC |
| 1381709 | | | | | |
| AD- | 96 | 118 | AAAGUCGGCCAAGAAAGACAA | UUGUCUUUCUUGGCCGACUUUCC | GGAAAGTCGGCCAAGAAAGACAA |
| 1381710 | | | | | |
| AD- | 97 | 119 | AAGUCGGCCAAGAAAGACAAA | UUUGUCUUUCUUGGCCGACUUUC | GAAAGTCGGCCAAGAAAGACAAA |
| 1381711 | | | | | |
| AD- | 98 | 120 | AGUCGGCCAAGAAAGACAAAG | CUUUGUCUUUCUUGGCCGACUUU | AAAGTCGGCCAAGAAAGACAAAG |
| 1381712 | | | | | |
| AD- | 100 | 122 | UCGGCCAAGAAAGACAAAGAC | GUCUUUGUCUUUCUUGGCCGACU | AGTCGGCCAAGAAAGACAAAGAC |
| 1381713 | | | | | |
| AD- | 101 | 123 | CGGCCAAGAAAGACAAAGACC | GGUCUUUGUCUUUCUUGGCCGAC | GTCGGCCAAGAAAGACAAAGACC |
| 1381714 | | | | | |
| AD- | 102 | 124 | GGCCAAGAAAGACAAAGACCC | GGGUCUUUGUCUUUCUUGGCCGA | TCGGCCAAGAAAGACAAAGACCC |
| 1381715 | | | | | |
| AD- | 105 | 127 | CAAGAAAGACAAAGACCCAGU | ACUGGGUCUUUGUCUUUCUUGGC | GCCAAGAAAGACAAAGACCCAGT |
| 1381716 | | | | | |
| AD- | 106 | 128 | AAGAAAGACAAAGACCCAGUG | CACUGGGUCUUUGUCUUUCUUGG | CCAAGAAAGACAAAGACCCAGTG |
| 1381717 | | | | | |
| AD- | 107 | 129 | AGAAAGACAAAGACCCAGUGA | UCACUGGGUCUUUGUCUUUCUUG | CAAGAAAGACAAAGACCCAGTGA |
| 1381718 | | | | | |
| AD- | 109 | 131 | AAAGACAAAGACCCAGUGAAC | GUUCACUGGGUCUUUGUCUUUCU | AGAAAGACAAAGACCCAGTGAAC |
| 1381719 | | | | | |
| AD- | 110 | 132 | AAGACAAAGACCCAGUGAACA | UGUUCACUGGGUCUUUGUCUUUC | GAAAGACAAAGACCCAGTGAACA |
| 1381720 | | | | | |
| AD- | 111 | 133 | AGACAAAGACCCAGUGAACAA | UUGUUCACUGGGUCUUUGUCUUU | AAAGACAAAGACCCAGTGAACAA |
| 1381721 | | | | | |
| AD- | 112 | 134 | GACAAAGACCCAGUGAACAAA | UUUGUUCACUGGGUCUUUGUCUU | AAGACAAAGACCCAGTGAACAAA |
| 1381722 | | | | | |
| AD- | 114 | 136 | CAAAGACCCAGUGAACAAAUC | GAUUUGUUCACUGGGUCUUUGUC | GACAAAGACCCAGTGAACAAATC |
| 1381723 | | | | | |
| AD- | 115 | 137 | AAAGACCCAGUGAACAAAUCC | GGAUUUGUUCACUGGGUCUUUGU | ACAAAGACCCAGTGAACAAATCC |
| 1381724 | | | | | |
| AD- | 116 | 138 | AAGACCCAGUGAACAAAUCCG | CGGAUUUGUUCACUGGGUCUUUG | CAAAGACCCAGTGAACAAATCCG |
| 1381725 | | | | | |
| AD- | 118 | 140 | GACCCAGUGAACAAAUCCGGG | CCCGGAUUUGUUCACUGGGUCUU | AAGACCCAGTGAACAAATCCGGG |
| 1381726 | | | | | |
| AD- | 136 | 158 | GGGGGCAAGGCCAAAAAGAAG | CUUCUUUUUGGCCUUGCCCCCGG | CCGGGGGCAAGGCCAAAAAGAAG |
| 1381727 | | | | | |
| AD- | 137 | 159 | GGGGCAAGGCCAAAAAGAAGA | UCUUCUUUUUGGCCUUGCCCCCG | CGGGGGCAAGGCCAAAAAGAAGA |
| 1381728 | | | | | |
| AD- | 141 | 163 | CAAGGCCAAAAAGAAGAAGUG | CACUUCUUCUUUUUGGCCUUGCC | GGCAAGGCCAAAAAGAAGAAGTG |
| 1381729 | | | | | |
| AD- | 142 | 164 | AAGGCCAAAAAGAAGAAGUGG | CCACUUCUUCUUUUUGGCCUUGC | GCAAGGCCAAAAAGAAGAAGTGG |
| 1381730 | | | | | |
| AD- | 143 | 165 | AGGCCAAAAAGAAGAAGUGGU | ACCACUUCUUCUUUUUGGCCUUG | CAAGGCCAAAAAGAAGAAGTGGT |
| 1381731 | | | | | |
| AD- | 145 | 167 | GCCAAAAAGAAGAAGUGGUCC | GGACCACUUCUUCUUUUUGGCCU | AGGCCAAAAAGAAGAAGTGGTCC |
| 1381732 | | | | | |
| AD- | 146 | 168 | CCAAAAAGAAGAAGUGGUCCA | UGGACCACUUCUUCUUUUUGGCC | GGCCAAAAAGAAGAAGTGGTCCA |
| 1381733 | | | | | |
| AD- | 147 | 169 | CAAAAAGAAGAAGUGGUCCAA | UUGGACCACUUCUUCUUUUUGGC | GCCAAAAAGAAGAAGTGGTCCAA |
| 1381734 | | | | | |
| AD- | 149 | 171 | AAAAGAAGAAGUGGUCCAAAG | CUUUGGACCACUUCUUCUUUUUG | CAAAAAGAAGAAGTGGTCCAAAG |
| 1381735 | | | | | |
| AD- | 150 | 172 | AAAGAAGAAGUGGUCCAAAGG | CCUUUGGACCACUUCUUCUUUUU | AAAAAGAAGAAGTGGTCCAAAGG |
| 1381736 | | | | | |
| AD- | 151 | 173 | AAGAAGAAGUGGUCCAAAGGC | GCCUUUGGACCACUUCUUCUUUU | AAAAGAAGAAGTGGTCCAAAGGC |
| 1381737 | | | | | |
| AD- | 153 | 175 | GAAGAAGUGGUCCAAAGGCAA | UUGCCUUUGGACCACUUCUUCUU | AAGAAGAAGTGGTCCAAAGGCAA |
| 1381738 | | | | | |
| AD- | 154 | 176 | AAGAAGUGGUCCAAAGGCAAA | UUUGCCUUUGGACCACUUCUUCU | AGAAGAAGTGGTCCAAAGGCAAA |
| 1381739 | | | | | |
| AD- | 155 | 177 | AGAAGUGGUCCAAAGGCAAAG | CUUUGCCUUUGGACCACUUCUUC | GAAGAAGTGGTCCAAAGGCAAAG |
| 1381740 | | | | | |
| AD- | 157 | 179 | AAGUGGUCCAAAGGCAAAGUU | AACUUUGCCUUUGGACCACUUCU | AGAAGTGGTCCAAAGGCAAAGTT |
| 1381741 | | | | | |
| AD- | 158 | 180 | AGUGGUCCAAAGGCAAAGUUC | GAACUUUGCCUUUGGACCACUUC | GAAGTGGTCCAAAGGCAAAGTTC |
| 1381742 | | | | | |
| AD- | 159 | 181 | GUGGUCCAAAGGCAAAGUUCG | CGAACUUUGCCUUUGGACCACUU | AAGTGGTCCAAAGGCAAAGTTCG |
| 1381743 | | | | | |
| AD- | 161 | 183 | GGUCCAAAGGCAAAGUUCGGG | CCCGAACUUUGCCUUUGGACCAC | GTGGTCCAAAGGCAAAGTTCGGG |
| 1381744 | | | | | |
| AD- | 162 | 184 | GUCCAAAGGCAAAGUUCGGGA | UCCCGAACUUUGCCUUUGGACCA | TGGTCCAAAGGCAAAGTTCGGGA |
| 1381745 | | | | | |
| AD- | 163 | 185 | UCCAAAGGCAAAGUUCGGGAC | GUCCCGAACUUUGCCUUUGGACC | GGTCCAAAGGCAAAGTTCGGGAC |
| 1381746 | | | | | |
| AD- | 165 | 187 | CAAAGGCAAAGUUCGGGACAA | UUGUCCCGAACUUUGCCUUUGGA | TCCAAAGGCAAAGTTCGGGACAA |
| 1381747 | | | | | |
| AD- | 166 | 188 | AAAGGCAAAGUUCGGGACAAG | CUUGUCCCGAACUUUGCCUUUGG | CCAAAGGCAAAGTTCGGGACAAG |
| 1381748 | | | | | |
| AD- | 167 | 189 | AAGGCAAAGUUCGGGACAAGC | GCUUGUCCCGAACUUUGCCUUUG | CAAAGGCAAAGTTCGGGACAAGC |
| 1381749 | | | | | |
| AD- | 169 | 191 | GGCAAAGUUCGGGACAAGCUC | GAGCUUGUCCCGAACUUUGCCUU | AAGGCAAAGTTCGGGACAAGCTC |
| 1381750 | | | | | |
| AD- | 170 | 192 | GCAAAGUUCGGGACAAGCUCA | UGAGCUUGUCCCGAACUUUGCCU | AGGCAAAGTTCGGGACAAGCTCA |
| 1381751 | | | | | |
| AD- | 171 | 193 | CAAAGUUCGGGACAAGCUCAA | UUGAGCUUGUCCCGAACUUUGCC | GGCAAAGTTCGGGACAAGCTCAA |
| 1381752 | | | | | |
| AD- | 172 | 194 | AAAGUUCGGGACAAGCUCAAU | AUUGAGCUUGUCCCGAACUUUGC | GCAAAGTTCGGGACAAGCTCAAT |
| 1381753 | | | | | |
| AD- | 174 | 196 | AGUUCGGGACAAGCUCAAUAA | UUAUUGAGCUUGUCCCGAACUUU | AAAGTTCGGGACAAGCTCAATAA |
| 1381754 | | | | | |
| AD- | 175 | 197 | GUUCGGGACAAGCUCAAUAAC | GUUAUUGAGCUUGUCCCGAACUU | AAGTTCGGGACAAGCTCAATAAC |
| 1381755 | | | | | |
| AD- | 176 | 198 | UUCGGGACAAGCUCAAUAACU | AGUUAUUGAGCUUGUCCCGAACU | AGTTCGGGACAAGCTCAATAACT |
| 1381756 | | | | | |
| AD- | 178 | 200 | CGGGACAAGCUCAAUAACUUA | UAAGUUAUUGAGCUUGUCCCGAA | TTCGGGACAAGCTCAATAACTTA |
| 1381757 | | | | | |
| AD- | 179 | 201 | GGGACAAGCUCAAUAACUUAG | CUAAGUUAUUGAGCUUGUCCCGA | TCGGGACAAGCTCAATAACTTAG |
| 1381758 | | | | | |
| AD- | 180 | 202 | GGACAAGCUCAAUAACUUAGU | ACUAAGUUAUUGAGCUUGUCCCG | CGGGACAAGCTCAATAACTTAGT |
| 1381759 | | | | | |
| AD- | 182 | 204 | ACAAGCUCAAUAACUUAGUCU | AGACUAAGUUAUUGAGCUUGUCC | GGACAAGCTCAATAACTTAGTCT |
| 1381760 | | | | | |
| AD- | 183 | 205 | CAAGCUCAAUAACUUAGUCUU | AAGACUAAGUUAUUGAGCUUGUC | GACAAGCTCAATAACTTAGTCTT |
| 1381761 | | | | | |
| AD- | 184 | 206 | AAGCUCAAUAACUUAGUCUUG | CAAGACUAAGUUAUUGAGCUUGU | ACAAGCTCAATAACTTAGTCTTG |
| 1381762 | | | | | |
| AD- | 186 | 208 | GCUCAAUAACUUAGUCUUGUU | AACAAGACUAAGUUAUUGAGCUU | AAGCTCAATAACTTAGTCTTGTT |
| 1381763 | | | | | |
| AD- | 187 | 209 | CUCAAUAACUUAGUCUUGUUU | AAACAAGACUAAGUUAUUGAGCU | AGCTCAATAACTTAGTCTTGTTT |
| 1381764 | | | | | |
| AD- | 188 | 210 | UCAAUAACUUAGUCUUGUUUG | CAAACAAGACUAAGUUAUUGAGC | GCTCAATAACTTAGTCTTGTTTG |
| 1381765 | | | | | |
| AD- | 190 | 212 | AAUAACUUAGUCUUGUUUGAC | GUCAAACAAGACUAAGUUAUUGA | TCAATAACTTAGTCTTGTTTGAC |
| 1381766 | | | | | |
| AD- | 191 | 213 | AUAACUUAGUCUUGUUUGACA | UGUCAAACAAGACUAAGUUAUUG | CAATAACTTAGTCTTGTTTGACA |
| 1381767 | | | | | |
| AD- | 192 | 214 | UAACUUAGUCUUGUUUGACAA | UUGUCAAACAAGACUAAGUUAUU | AATAACTTAGTCTTGTTTGACAA |
| 1381768 | | | | | |
| AD- | 194 | 216 | ACUUAGUCUUGUUUGACAAAG | CUUUGUCAAACAAGACUAAGUUA | TAACTTAGTCTTGTTTGACAAAG |
| 1381769 | | | | | |
| AD- | 195 | 217 | CUUAGUCUUGUUUGACAAAGC | GCUUUGUCAAACAAGACUAAGUU | AACTTAGTCTTGTTTGACAAAGC |
| 1381770 | | | | | |
| AD- | 196 | 218 | UUAGUCUUGUUUGACAAAGCU | AGCUUUGUCAAACAAGACUAAGU | ACTTAGTCTTGTTTGACAAAGCT |
| 1381771 | | | | | |
| AD- | 198 | 220 | AGUCUUGUUUGACAAAGCUAC | GUAGCUUUGUCAAACAAGACUAA | TTAGTCTTGTTTGACAAAGCTAC |
| 1381772 | | | | | |
| AD- | 199 | 221 | GUCUUGUUUGACAAAGCUACC | GGUAGCUUUGUCAAACAAGACUA | TAGTCTTGTTTGACAAAGCTACC |
| 1381773 | | | | | |
| AD- | 200 | 222 | UCUUGUUUGACAAAGCUACCU | AGGUAGCUUUGUCAAACAAGACU | AGTCTTGTTTGACAAAGCTACCT |
| 1381774 | | | | | |
| AD- | 202 | 224 | UUGUUUGACAAAGCUACCUAU | AUAGGUAGCUUUGUCAAACAAGA | TCTTGTTTGACAAAGCTACCTAT |
| 1381775 | | | | | |
| AD- | 203 | 225 | UGUUUGACAAAGCUACCUAUG | CAUAGGUAGCUUUGUCAAACAAG | CTTGTTTGACAAAGCTACCTATG |
| 1381776 | | | | | |
| AD- | 204 | 226 | GUUUGACAAAGCUACCUAUGA | UCAUAGGUAGCUUUGUCAAACAA | TTGTTTGACAAAGCTACCTATGA |
| 1381777 | | | | | |
| AD- | 205 | 227 | UUUGACAAAGCUACCUAUGAU | AUCAUAGGUAGCUUUGUCAAACA | TGTTTGACAAAGCTACCTATGAT |
| 1381778 | | | | | |
| AD- | 207 | 229 | UGACAAAGCUACCUAUGAUAA | UUAUCAUAGGUAGCUUUGUCAAA | TTTGACAAAGCTACCTATGATAA |
| 1381779 | | | | | |
| AD- | 208 | 230 | GACAAAGCUACCUAUGAUAAA | UUUAUCAUAGGUAGCUUUGUCAA | TTGACAAAGCTACCTATGATAAA |
| 1381780 | | | | | |
| AD- | 209 | 231 | ACAAAGCUACCUAUGAUAAAC | GUUUAUCAUAGGUAGCUUUGUCA | TGACAAAGCTACCTATGATAAAC |
| 1381781 | | | | | |
| AD- | 211 | 233 | AAAGCUACCUAUGAUAAACUC | GAGUUUAUCAUAGGUAGCUUUGU | ACAAAGCTACCTATGATAAACTC |
| 1381782 | | | | | |
| AD- | 212 | 234 | AAGCUACCUAUGAUAAACUCU | AGAGUUUAUCAUAGGUAGCUUUG | CAAAGCTACCTATGATAAACTCT |
| 1381783 | | | | | |
| AD- | 213 | 235 | AGCUACCUAUGAUAAACUCUG | CAGAGUUUAUCAUAGGUAGCUUU | AAAGCTACCTATGATAAACTCTG |
| 1381784 | | | | | |
| AD- | 215 | 237 | CUACCUAUGAUAAACUCUGUA | UACAGAGUUUAUCAUAGGUAGCU | AGCTACCTATGATAAACTCTGTA |
| 1381785 | | | | | |
| AD- | 216 | 238 | UACCUAUGAUAAACUCUGUAA | UUACAGAGUUUAUCAUAGGUAGC | GCTACCTATGATAAACTCTGTAA |
| 1381786 | | | | | |
| AD- | 217 | 239 | ACCUAUGAUAAACUCUGUAAG | CUUACAGAGUUUAUCAUAGGUAG | CTACCTATGATAAACTCTGTAAG |
| 1381787 | | | | | |
| AD- | 219 | 241 | CUAUGAUAAACUCUGUAAGGA | UCCUUACAGAGUUUAUCAUAGGU | ACCTATGATAAACTCTGTAAGGA |
| 1381788 | | | | | |
| AD- | 220 | 242 | UAUGAUAAACUCUGUAAGGAA | UUCCUUACAGAGUUUAUCAUAGG | CCTATGATAAACTCTGTAAGGAA |
| 1381789 | | | | | |
| AD- | 221 | 243 | AUGAUAAACUCUGUAAGGAAG | CUUCCUUACAGAGUUUAUCAUAG | CTATGATAAACTCTGTAAGGAAG |
| 1381790 | | | | | |
| AD- | 223 | 245 | GAUAAACUCUGUAAGGAAGUU | AACUUCCUUACAGAGUUUAUCAU | ATGATAAACTCTGTAAGGAAGTT |
| 1381791 | | | | | |
| AD- | 224 | 246 | AUAAACUCUGUAAGGAAGUUC | GAACUUCCUUACAGAGUUUAUCA | TGATAAACTCTGTAAGGAAGTTC |
| 1381792 | | | | | |
| AD- | 225 | 247 | UAAACUCUGUAAGGAAGUUCC | GGAACUUCCUUACAGAGUUUAUC | GATAAACTCTGTAAGGAAGTTCC |
| 1381793 | | | | | |
| AD- | 227 | 249 | AACUCUGUAAGGAAGUUCCCA | UGGGAACUUCCUUACAGAGUUUA | TAAACTCTGTAAGGAAGTTCCCA |
| 1381794 | | | | | |
| AD- | 228 | 250 | ACUCUGUAAGGAAGUUCCCAA | UUGGGAACUUCCUUACAGAGUUU | AAACTCTGTAAGGAAGTTCCCAA |
| 1381795 | | | | | |
| AD- | 229 | 251 | CUCUGUAAGGAAGUUCCCAAC | GUUGGGAACUUCCUUACAGAGUU | AACTCTGTAAGGAAGTTCCCAAC |
| 1381796 | | | | | |
| AD- | 231 | 253 | CUGUAAGGAAGUUCCCAACUA | UAGUUGGGAACUUCCUUACAGAG | CTCTGTAAGGAAGTTCCCAACTA |
| 1381797 | | | | | |
| AD- | 232 | 254 | UGUAAGGAAGUUCCCAACUAU | AUAGUUGGGAACUUCCUUACAGA | TCTGTAAGGAAGTTCCCAACTAT |
| 1381798 | | | | | |
| AD- | 233 | 255 | GUAAGGAAGUUCCCAACUAUA | UAUAGUUGGGAACUUCCUUACAG | CTGTAAGGAAGTTCCCAACTATA |
| 1381799 | | | | | |
| AD- | 235 | 257 | AAGGAAGUUCCCAACUAUAAA | UUUAUAGUUGGGAACUUCCUUAC | GTAAGGAAGTTCCCAACTATAAA |
| 1381800 | | | | | |
| AD- | 236 | 258 | AGGAAGUUCCCAACUAUAAAC | GUUUAUAGUUGGGAACUUCCUUA | TAAGGAAGTTCCCAACTATAAAC |
| 1381801 | | | | | |
| AD- | 237 | 259 | GGAAGUUCCCAACUAUAAACU | AGUUUAUAGUUGGGAACUUCCUU | AAGGAAGTTCCCAACTATAAACT |
| 1381802 | | | | | |
| AD- | 239 | 261 | AAGUUCCCAACUAUAAACUUA | UAAGUUUAUAGUUGGGAACUUCC | GGAAGTTCCCAACTATAAACTTA |
| 1381803 | | | | | |
| AD- | 240 | 262 | AGUUCCCAACUAUAAACUUAU | AUAAGUUUAUAGUUGGGAACUUC | GAAGTTCCCAACTATAAACTTAT |
| 1381804 | | | | | |
| AD- | 241 | 263 | GUUCCCAACUAUAAACUUAUA | UAUAAGUUUAUAGUUGGGAACUU | AAGTTCCCAACTATAAACTTATA |
| 1381805 | | | | | |
| AD- | 243 | 265 | UCCCAACUAUAAACUUAUAAC | GUUAUAAGUUUAUAGUUGGGAAC | GTTCCCAACTATAAACTTATAAC |
| 1381806 | | | | | |
| AD- | 244 | 266 | CCCAACUAUAAACUUAUAACC | GGUUAUAAGUUUAUAGUUGGGAA | TTCCCAACTATAAACTTATAACC |
| 1381807 | | | | | |
| AD- | 245 | 267 | CCAACUAUAAACUUAUAACCC | GGGUUAUAAGUUUAUAGUUGGGA | TCCCAACTATAAACTTATAACCC |
| 1381808 | | | | | |
| AD- | 262 | 284 | ACCCCAGCUGUGGUCUCUGAG | CUCAGAGACCACAGCUGGGGUUA | TAACCCCAGCTGTGGTCTCTGAG |
| 1381809 | | | | | |
| AD- | 264 | 286 | CCCAGCUGUGGUCUCUGAGAG | CUCUCAGAGACCACAGCUGGGGU | ACCCCAGCTGTGGTCTCTGAGAG |
| 1381810 | | | | | |
| AD- | 265 | 287 | CCAGCUGUGGUCUCUGAGAGA | UCUCUCAGAGACCACAGCUGGGG | CCCCAGCTGTGGTCTCTGAGAGA |
| 1381811 | | | | | |
| AD- | 266 | 288 | CAGCUGUGGUCUCUGAGAGAC | GUCUCUCAGAGACCACAGCUGGG | CCCAGCTGTGGTCTCTGAGAGAC |
| 1381812 | | | | | |
| AD- | 268 | 290 | GCUGUGGUCUCUGAGAGACUG | CAGUCUCUCAGAGACCACAGCUG | CAGCTGTGGTCTCTGAGAGACTG |
| 1381813 | | | | | |
| AD- | 269 | 291 | CUGUGGUCUCUGAGAGACUGA | UCAGUCUCUCAGAGACCACAGCU | AGCTGTGGTCTCTGAGAGACTGA |
| 1381814 | | | | | |
| AD- | 270 | 292 | UGUGGUCUCUGAGAGACUGAA | UUCAGUCUCUCAGAGACCACAGC | GCTGTGGTCTCTGAGAGACTGAA |
| 1381815 | | | | | |
| AD- | 272 | 294 | UGGUCUCUGAGAGACUGAAGA | UCUUCAGUCUCUCAGAGACCACA | TGTGGTCTCTGAGAGACTGAAGA |
| 1381816 | | | | | |
| AD- | 273 | 295 | GGUCUCUGAGAGACUGAAGAU | AUCUUCAGUCUCUCAGAGACCAC | GTGGTCTCTGAGAGACTGAAGAT |
| 1381817 | | | | | |
| AD- | 274 | 296 | GUCUCUGAGAGACUGAAGAUU | AAUCUUCAGUCUCUCAGAGACCA | TGGTCTCTGAGAGACTGAAGATT |
| 1381818 | | | | | |
| AD- | 276 | 298 | CUCUGAGAGACUGAAGAUUCG | CGAAUCUUCAGUCUCUCAGAGAC | GTCTCTGAGAGACTGAAGATTCG |
| 1381819 | | | | | |
| AD- | 277 | 299 | UCUGAGAGACUGAAGAUUCGA | UCGAAUCUUCAGUCUCUCAGAGA | TCTCTGAGAGACTGAAGATTCGA |
| 1381820 | | | | | |
| AD- | 278 | 300 | CUGAGAGACUGAAGAUUCGAG | CUCGAAUCUUCAGUCUCUCAGAG | CTCTGAGAGACTGAAGATTCGAG |
| 1381821 | | | | | |
| AD- | 280 | 302 | GAGAGACUGAAGAUUCGAGGC | GCCUCGAAUCUUCAGUCUCUCAG | CTGAGAGACTGAAGATTCGAGGC |
| 1381822 | | | | | |
| AD- | 281 | 303 | AGAGACUGAAGAUUCGAGGCU | AGCCUCGAAUCUUCAGUCUCUCA | TGAGAGACTGAAGATTCGAGGCT |
| 1381823 | | | | | |
| AD- | 282 | 304 | GAGACUGAAGAUUCGAGGCUC | GAGCCUCGAAUCUUCAGUCUCUC | GAGAGACTGAAGATTCGAGGCTC |
| 1381824 | | | | | |
| AD- | 284 | 306 | GACUGAAGAUUCGAGGCUCCC | GGGAGCCUCGAAUCUUCAGUCUC | GAGACTGAAGATTCGAGGCTCCC |
| 1381825 | | | | | |
| AD- | 285 | 307 | ACUGAAGAUUCGAGGCUCCCU | AGGGAGCCUCGAAUCUUCAGUCU | AGACTGAAGATTCGAGGCTCCCT |
| 1381826 | | | | | |
| AD- | 286 | 308 | CUGAAGAUUCGAGGCUCCCUG | CAGGGAGCCUCGAAUCUUCAGUC | GACTGAAGATTCGAGGCTCCCTG |
| 1381827 | | | | | |
| AD- | 288 | 310 | GAAGAUUCGAGGCUCCCUGGC | GCCAGGGAGCCUCGAAUCUUCAG | CTGAAGATTCGAGGCTCCCTGGC |
| 1381828 | | | | | |
| AD- | 289 | 311 | AAGAUUCGAGGCUCCCUGGCC | GGCCAGGGAGCCUCGAAUCUUCA | TGAAGATTCGAGGCTCCCTGGCC |
| 1381829 | | | | | |
| AD- | 290 | 312 | AGAUUCGAGGCUCCCUGGCCA | UGGCCAGGGAGCCUCGAAUCUUC | GAAGATTCGAGGCTCCCTGGCCA |
| 1381830 | | | | | |
| AD- | 292 | 314 | AUUCGAGGCUCCCUGGCCAGG | CCUGGCCAGGGAGCCUCGAAUCU | AGATTCGAGGCTCCCTGGCCAGG |
| 1381831 | | | | | |
| AD- | 302 | 324 | CCCUGGCCAGGGCAGCCCUUC | GAAGGGCUGCCCUGGCCAGGGAG | CTCCCTGGCCAGGGCAGCCCTTC |
| 1381832 | | | | | |
| AD- | 303 | 325 | CCUGGCCAGGGCAGCCCUUCA | UGAAGGGCUGCCCUGGCCAGGGA | TCCCTGGCCAGGGCAGCCCTTCA |
| 1381833 | | | | | |
| AD- | 304 | 326 | CUGGCCAGGGCAGCCCUUCAG | CUGAAGGGCUGCCCUGGCCAGGG | CCCTGGCCAGGGCAGCCCTTCAG |
| 1381834 | | | | | |
| AD- | 306 | 328 | GGCCAGGGCAGCCCUUCAGGA | UCCUGAAGGGCUGCCCUGGCCAG | CTGGCCAGGGCAGCCCTTCAGGA |
| 1381835 | | | | | |
| AD- | 307 | 329 | GCCAGGGCAGCCCUUCAGGAG | CUCCUGAAGGGCUGCCCUGGCCA | TGGCCAGGGCAGCCCTTCAGGAG |
| 1381836 | | | | | |
| AD- | 308 | 330 | CCAGGGCAGCCCUUCAGGAGC | GCUCCUGAAGGGCUGCCCUGGCC | GGCCAGGGCAGCCCTTCAGGAGC |
| 1381837 | | | | | |
| AD- | 310 | 332 | AGGGCAGCCCUUCAGGAGCUC | GAGCUCCUGAAGGGCUGCCCUGG | CCAGGGCAGCCCTTCAGGAGCTC |
| 1381838 | | | | | |
| AD- | 311 | 333 | GGGCAGCCCUUCAGGAGCUCC | GGAGCUCCUGAAGGGCUGCCCUG | CAGGGCAGCCCTTCAGGAGCTCC |
| 1381839 | | | | | |
| AD- | 312 | 334 | GGCAGCCCUUCAGGAGCUCCU | AGGAGCUCCUGAAGGGCUGCCCU | AGGGCAGCCCTTCAGGAGCTCCT |
| 1381840 | | | | | |
| AD- | 314 | 336 | CAGCCCUUCAGGAGCUCCUUA | UAAGGAGCUCCUGAAGGGCUGCC | GGCAGCCCTTCAGGAGCTCCTTA |
| 1381841 | | | | | |
| AD- | 315 | 337 | AGCCCUUCAGGAGCUCCUUAG | CUAAGGAGCUCCUGAAGGGCUGC | GCAGCCCTTCAGGAGCTCCTTAG |
| 1381842 | | | | | |
| AD- | 316 | 338 | GCCCUUCAGGAGCUCCUUAGU | ACUAAGGAGCUCCUGAAGGGCUG | CAGCCCTTCAGGAGCTCCTTAGT |
| 1381843 | | | | | |
| AD- | 318 | 340 | CCUUCAGGAGCUCCUUAGUAA | UUACUAAGGAGCUCCUGAAGGGC | GCCCTTCAGGAGCTCCTTAGTAA |
| 1381844 | | | | | |
| AD- | 319 | 341 | CUUCAGGAGCUCCUUAGUAAA | UUUACUAAGGAGCUCCUGAAGGG | CCCTTCAGGAGCTCCTTAGTAAA |
| 1381845 | | | | | |
| AD- | 320 | 342 | UUCAGGAGCUCCUUAGUAAAG | CUUUACUAAGGAGCUCCUGAAGG | CCTTCAGGAGCTCCTTAGTAAAG |
| 1381846 | | | | | |
| AD- | 322 | 344 | CAGGAGCUCCUUAGUAAAGGA | UCCUUUACUAAGGAGCUCCUGAA | TTCAGGAGCTCCTTAGTAAAGGA |
| 1381847 | | | | | |
| AD- | 323 | 345 | AGGAGCUCCUUAGUAAAGGAC | GUCCUUUACUAAGGAGCUCCUGA | TCAGGAGCTCCTTAGTAAAGGAC |
| 1381848 | | | | | |
| AD- | 324 | 346 | GGAGCUCCUUAGUAAAGGACU | AGUCCUUUACUAAGGAGCUCCUG | CAGGAGCTCCTTAGTAAAGGACT |
| 1381849 | | | | | |
| AD- | 326 | 348 | AGCUCCUUAGUAAAGGACUUA | UAAGUCCUUUACUAAGGAGCUCC | GGAGCTCCTTAGTAAAGGACTTA |
| 1381850 | | | | | |
| AD- | 327 | 349 | GCUCCUUAGUAAAGGACUUAU | AUAAGUCCUUUACUAAGGAGCUC | GAGCTCCTTAGTAAAGGACTTAT |
| 1381851 | | | | | |
| AD- | 328 | 350 | CUCCUUAGUAAAGGACUUAUC | GAUAAGUCCUUUACUAAGGAGCU | AGCTCCTTAGTAAAGGACTTATC |
| 1381852 | | | | | |
| AD- | 330 | 352 | CCUUAGUAAAGGACUUAUCAA | UUGAUAAGUCCUUUACUAAGGAG | CTCCTTAGTAAAGGACTTATCAA |
| 1381853 | | | | | |
| AD- | 331 | 353 | CUUAGUAAAGGACUUAUCAAA | UUUGAUAAGUCCUUUACUAAGGA | TCCTTAGTAAAGGACTTATCAAA |
| 1381854 | | | | | |
| AD- | 332 | 354 | UUAGUAAAGGACUUAUCAAAC | GUUUGAUAAGUCCUUUACUAAGG | CCTTAGTAAAGGACTTATCAAAC |
| 1381855 | | | | | |
| AD- | 334 | 356 | AGUAAAGGACUUAUCAAACUG | CAGUUUGAUAAGUCCUUUACUAA | TTAGTAAAGGACTTATCAAACTG |
| 1381856 | | | | | |
| AD- | 335 | 357 | GUAAAGGACUUAUCAAACUGG | CCAGUUUGAUAAGUCCUUUACUA | TAGTAAAGGACTTATCAAACTGG |
| 1381857 | | | | | |
| AD- | 336 | 358 | UAAAGGACUUAUCAAACUGGU | ACCAGUUUGAUAAGUCCUUUACU | AGTAAAGGACTTATCAAACTGGT |
| 1381858 | | | | | |
| AD- | 338 | 360 | AAGGACUUAUCAAACUGGUUU | AAACCAGUUUGAUAAGUCCUUUA | TAAAGGACTTATCAAACTGGTTT |
| 1381859 | | | | | |
| AD- | 339 | 361 | AGGACUUAUCAAACUGGUUUC | GAAACCAGUUUGAUAAGUCCUUU | AAAGGACTTATCAAACTGGTTTC |
| 1381860 | | | | | |
| AD- | 340 | 362 | GGACUUAUCAAACUGGUUUCA | UGAAACCAGUUUGAUAAGUCCUU | AAGGACTTATCAAACTGGTTTCA |
| 1381861 | | | | | |
| AD- | 342 | 364 | ACUUAUCAAACUGGUUUCAAA | UUUGAAACCAGUUUGAUAAGUCC | GGACTTATCAAACTGGTTTCAAA |
| 1381862 | | | | | |
| AD- | 343 | 365 | CUUAUCAAACUGGUUUCAAAG | CUUUGAAACCAGUUUGAUAAGUC | GACTTATCAAACTGGTTTCAAAG |
| 1381863 | | | | | |
| AD- | 344 | 366 | UUAUCAAACUGGUUUCAAAGC | GCUUUGAAACCAGUUUGAUAAGU | ACTTATCAAACTGGTTTCAAAGC |
| 1381864 | | | | | |
| AD- | 345 | 367 | UAUCAAACUGGUUUCAAAGCA | UGCUUUGAAACCAGUUUGAUAAG | CTTATCAAACTGGTTTCAAAGCA |
| 1381865 | | | | | |
| AD- | 347 | 369 | UCAAACUGGUUUCAAAGCACA | UGUGCUUUGAAACCAGUUUGAUA | TATCAAACTGGTTTCAAAGCACA |
| 1381866 | | | | | |
| AD- | 348 | 370 | CAAACUGGUUUCAAAGCACAG | CUGUGCUUUGAAACCAGUUUGAU | ATCAAACTGGTTTCAAAGCACAG |
| 1381867 | | | | | |
| AD- | 349 | 371 | AAACUGGUUUCAAAGCACAGA | UCUGUGCUUUGAAACCAGUUUGA | TCAAACTGGTTTCAAAGCACAGA |
| 1381868 | | | | | |
| AD- | 351 | 373 | ACUGGUUUCAAAGCACAGAGC | GCUCUGUGCUUUGAAACCAGUUU | AAACTGGTTTCAAAGCACAGAGC |
| 1381869 | | | | | |
| AD- | 352 | 374 | CUGGUUUCAAAGCACAGAGCU | AGCUCUGUGCUUUGAAACCAGUU | AACTGGTTTCAAAGCACAGAGCT |
| 1381870 | | | | | |
| AD- | 353 | 375 | UGGUUUCAAAGCACAGAGCUC | GAGCUCUGUGCUUUGAAACCAGU | ACTGGTTTCAAAGCACAGAGCTC |
| 1381871 | | | | | |
| AD- | 355 | 377 | GUUUCAAAGCACAGAGCUCAA | UUGAGCUCUGUGCUUUGAAACCA | TGGTTTCAAAGCACAGAGCTCAA |
| 1381872 | | | | | |
| AD- | 356 | 378 | UUUCAAAGCACAGAGCUCAAG | CUUGAGCUCUGUGCUUUGAAACC | GGTTTCAAAGCACAGAGCTCAAG |
| 1381873 | | | | | |
| AD- | 357 | 379 | UUCAAAGCACAGAGCUCAAGU | ACUUGAGCUCUGUGCUUUGAAAC | GTTTCAAAGCACAGAGCTCAAGT |
| 1381874 | | | | | |
| AD- | 359 | 381 | CAAAGCACAGAGCUCAAGUAA | UUACUUGAGCUCUGUGCUUUGAA | TTCAAAGCACAGAGCTCAAGTAA |
| 1381875 | | | | | |
| AD- | 360 | 382 | AAAGCACAGAGCUCAAGUAAU | AUUACUUGAGCUCUGUGCUUUGA | TCAAAGCACAGAGCTCAAGTAAT |
| 1381876 | | | | | |
| AD- | 361 | 383 | AAGCACAGAGCUCAAGUAAUU | AAUUACUUGAGCUCUGUGCUUUG | CAAAGCACAGAGCTCAAGTAATT |
| 1381877 | | | | | |
| AD- | 363 | 385 | GCACAGAGCUCAAGUAAUUUA | UAAAUUACUUGAGCUCUGUGCUU | AAGCACAGAGCTCAAGTAATTTA |
| 1381878 | | | | | |
| AD- | 364 | 386 | CACAGAGCUCAAGUAAUUUAC | GUAAAUUACUUGAGCUCUGUGCU | AGCACAGAGCTCAAGTAATTTAC |
| 1381879 | | | | | |
| AD- | 365 | 387 | ACAGAGCUCAAGUAAUUUACA | UGUAAAUUACUUGAGCUCUGUGC | GCACAGAGCTCAAGTAATTTACA |
| 1381880 | | | | | |
| AD- | 367 | 389 | AGAGCUCAAGUAAUUUACACC | GGUGUAAAUUACUUGAGCUCUGU | ACAGAGCTCAAGTAATTTACACC |
| 1381881 | | | | | |
| AD- | 368 | 390 | GAGCUCAAGUAAUUUACACCA | UGGUGUAAAUUACUUGAGCUCUG | CAGAGCTCAAGTAATTTACACCA |
| 1381882 | | | | | |
| AD- | 369 | 391 | AGCUCAAGUAAUUUACACCAG | CUGGUGUAAAUUACUUGAGCUCU | AGAGCTCAAGTAATTTACACCAG |
| 1381883 | | | | | |
| AD- | 371 | 393 | CUCAAGUAAUUUACACCAGAA | UUCUGGUGUAAAUUACUUGAGCU | AGCTCAAGTAATTTACACCAGAA |
| 1381884 | | | | | |
| AD- | 372 | 394 | UCAAGUAAUUUACACCAGAAA | UUUCUGGUGUAAAUUACUUGAGC | GCTCAAGTAATTTACACCAGAAA |
| 1381885 | | | | | |
| AD- | 373 | 395 | CAAGUAAUUUACACCAGAAAU | AUUUCUGGUGUAAAUUACUUGAG | CTCAAGTAATTTACACCAGAAAT |
| 1381886 | | | | | |
| AD- | 375 | 397 | AGUAAUUUACACCAGAAAUAC | GUAUUUCUGGUGUAAAUUACUUG | CAAGTAATTTACACCAGAAATAC |
| 1381887 | | | | | |
| AD- | 376 | 398 | GUAAUUUACACCAGAAAUACC | GGUAUUUCUGGUGUAAAUUACUU | AAGTAATTTACACCAGAAATACC |
| 1381888 | | | | | |
| AD- | 377 | 399 | UAAUUUACACCAGAAAUACCA | UGGUAUUUCUGGUGUAAAUUACU | AGTAATTTACACCAGAAATACCA |
| 1381889 | | | | | |
| AD- | 378 | 400 | AAUUUACACCAGAAAUACCAA | UUGGUAUUUCUGGUGUAAAUUAC | GTAATTTACACCAGAAATACCAA |
| 1381890 | | | | | |
| AD- | 380 | 402 | UUUACACCAGAAAUACCAAGG | CCUUGGUAUUUCUGGUGUAAAUU | AATTTACACCAGAAATACCAAGG |
| 1381891 | | | | | |
| AD- | 381 | 403 | UUACACCAGAAAUACCAAGGG | CCCUUGGUAUUUCUGGUGUAAAU | ATTTACACCAGAAATACCAAGGG |
| 1381892 | | | | | |
| AD- | 382 | 404 | UACACCAGAAAUACCAAGGGU | ACCCUUGGUAUUUCUGGUGUAAA | TTTACACCAGAAATACCAAGGGT |
| 1381893 | | | | | |
| AD- | 384 | 406 | CACCAGAAAUACCAAGGGUGG | CCACCCUUGGUAUUUCUGGUGUA | TACACCAGAAATACCAAGGGTGG |
| 1381894 | | | | | |
| AD- | 385 | 407 | ACCAGAAAUACCAAGGGUGGA | UCCACCCUUGGUAUUUCUGGUGU | ACACCAGAAATACCAAGGGTGGA |
| 1381895 | | | | | |
| AD- | 386 | 408 | CCAGAAAUACCAAGGGUGGAG | CUCCACCCUUGGUAUUUCUGGUG | CACCAGAAATACCAAGGGTGGAG |
| 1381896 | | | | | |
| AD- | 388 | 410 | AGAAAUACCAAGGGUGGAGAU | AUCUCCACCCUUGGUAUUUCUGG | CCAGAAATACCAAGGGTGGAGAT |
| 1381897 | | | | | |
| AD- | 389 | 411 | GAAAUACCAAGGGUGGAGAUG | CAUCUCCACCCUUGGUAUUUCUG | CAGAAATACCAAGGGTGGAGATG |
| 1381898 | | | | | |
| AD- | 390 | 412 | AAAUACCAAGGGUGGAGAUGC | GCAUCUCCACCCUUGGUAUUUCU | AGAAATACCAAGGGTGGAGATGC |
| 1381899 | | | | | |
| AD- | 392 | 414 | AUACCAAGGGUGGAGAUGCUC | GAGCAUCUCCACCCUUGGUAUUU | AAATACCAAGGGTGGAGATGCTC |
| 1381900 | | | | | |
| AD- | 393 | 415 | UACCAAGGGUGGAGAUGCUCC | GGAGCAUCUCCACCCUUGGUAUU | AATACCAAGGGTGGAGATGCTCC |
| 1381901 | | | | | |
| AD- | 394 | 416 | ACCAAGGGUGGAGAUGCUCCA | UGGAGCAUCUCCACCCUUGGUAU | ATACCAAGGGTGGAGATGCTCCA |
| 1381902 | | | | | |
| AD- | 396 | 418 | CAAGGGUGGAGAUGCUCCAGC | GCUGGAGCAUCUCCACCCUUGGU | ACCAAGGGTGGAGATGCTCCAGC |
| 1381903 | | | | | |
| AD- | 397 | 419 | AAGGGUGGAGAUGCUCCAGCU | AGCUGGAGCAUCUCCACCCUUGG | CCAAGGGTGGAGATGCTCCAGCT |
| 1381904 | | | | | |
| AD- | 398 | 420 | AGGGUGGAGAUGCUCCAGCUG | CAGCUGGAGCAUCUCCACCCUUG | CAAGGGTGGAGATGCTCCAGCTG |
| 1381905 | | | | | |
| AD- | 400 | 422 | GGUGGAGAUGCUCCAGCUGCU | AGCAGCUGGAGCAUCUCCACCCU | AGGGTGGAGATGCTCCAGCTGCT |
| 1381906 | | | | | |
| AD- | 401 | 423 | GUGGAGAUGCUCCAGCUGCUG | CAGCAGCUGGAGCAUCUCCACCC | GGGTGGAGATGCTCCAGCTGCTG |
| 1381907 | | | | | |
| AD- | 402 | 424 | UGGAGAUGCUCCAGCUGCUGG | CCAGCAGCUGGAGCAUCUCCACC | GGTGGAGATGCTCCAGCTGCTGG |
| 1381908 | | | | | |
| AD- | 404 | 426 | GAGAUGCUCCAGCUGCUGGUG | CACCAGCAGCUGGAGCAUCUCCA | TGGAGATGCTCCAGCTGCTGGTG |
| 1381909 | | | | | |
| AD- | 405 | 427 | AGAUGCUCCAGCUGCUGGUGA | UCACCAGCAGCUGGAGCAUCUCC | GGAGATGCTCCAGCTGCTGGTGA |
| 1381910 | | | | | |
| AD- | 406 | 428 | GAUGCUCCAGCUGCUGGUGAA | UUCACCAGCAGCUGGAGCAUCUC | GAGATGCTCCAGCTGCTGGTGAA |
| 1381911 | | | | | |
| AD- | 408 | 430 | UGCUCCAGCUGCUGGUGAAGA | UCUUCACCAGCAGCUGGAGCAUC | GATGCTCCAGCTGCTGGTGAAGA |
| 1381912 | | | | | |
| AD- | 409 | 431 | GCUCCAGCUGCUGGUGAAGAU | AUCUUCACCAGCAGCUGGAGCAU | ATGCTCCAGCTGCTGGTGAAGAT |
| 1381913 | | | | | |
| AD- | 410 | 432 | CUCCAGCUGCUGGUGAAGAUG | CAUCUUCACCAGCAGCUGGAGCA | TGCTCCAGCTGCTGGTGAAGATG |
| 1381914 | | | | | |
| AD- | 412 | 434 | CCAGCUGCUGGUGAAGAUGCA | UGCAUCUUCACCAGCAGCUGGAG | CTCCAGCTGCTGGTGAAGATGCA |
| 1381915 | | | | | |
| AD- | 413 | 435 | CAGCUGCUGGUGAAGAUGCAU | AUGCAUCUUCACCAGCAGCUGGA | TCCAGCTGCTGGTGAAGATGCAT |
| 1381916 | | | | | |
| AD- | 414 | 436 | AGCUGCUGGUGAAGAUGCAUG | CAUGCAUCUUCACCAGCAGCUGG | CCAGCTGCTGGTGAAGATGCATG |
| 1381917 | | | | | |
| AD- | 416 | 438 | CUGCUGGUGAAGAUGCAUGAA | UUCAUGCAUCUUCACCAGCAGCU | AGCTGCTGGTGAAGATGCATGAA |
| 1381918 | | | | | |
| AD- | 417 | 439 | UGCUGGUGAAGAUGCAUGAAU | AUUCAUGCAUCUUCACCAGCAGC | GCTGCTGGTGAAGATGCATGAAT |
| 1381919 | | | | | |
| AD- | 418 | 440 | GCUGGUGAAGAUGCAUGAAUA | UAUUCAUGCAUCUUCACCAGCAG | CTGCTGGTGAAGATGCATGAATA |
| 1381920 | | | | | |
| AD- | 420 | 442 | UGGUGAAGAUGCAUGAAUAGG | CCUAUUCAUGCAUCUUCACCAGC | GCTGGTGAAGATGCATGAATAGG |
| 1381921 | | | | | |
| AD- | 421 | 443 | GGUGAAGAUGCAUGAAUAGGU | ACCUAUUCAUGCAUCUUCACCAG | CTGGTGAAGATGCATGAATAGGT |
| 1381922 | | | | | |
| AD- | 422 | 444 | GUGAAGAUGCAUGAAUAGGUC | GACCUAUUCAUGCAUCUUCACCA | TGGTGAAGATGCATGAATAGGTC |
| 1381923 | | | | | |
| AD- | 423 | 445 | UGAAGAUGCAUGAAUAGGUCC | GGACCUAUUCAUGCAUCUUCACC | GGTGAAGATGCATGAATAGGTCC |
| 1381924 | | | | | |
| AD- | 425 | 447 | AAGAUGCAUGAAUAGGUCCAA | UUGGACCUAUUCAUGCAUCUUCA | TGAAGATGCATGAATAGGTCCAA |
| 1381925 | | | | | |
| AD- | 426 | 448 | AGAUGCAUGAAUAGGUCCAAC | GUUGGACCUAUUCAUGCAUCUUC | GAAGATGCATGAATAGGTCCAAC |
| 1381926 | | | | | |
| AD- | 427 | 449 | GAUGCAUGAAUAGGUCCAACC | GGUUGGACCUAUUCAUGCAUCUU | AAGATGCATGAATAGGTCCAACC |
| 1381927 | | | | | |
| AD- | 429 | 451 | UGCAUGAAUAGGUCCAACCAG | CUGGUUGGACCUAUUCAUGCAUC | GATGCATGAATAGGTCCAACCAG |
| 1381928 | | | | | |
| AD- | 430 | 452 | GCAUGAAUAGGUCCAACCAGC | GCUGGUUGGACCUAUUCAUGCAU | ATGCATGAATAGGTCCAACCAGC |
| 1381929 | | | | | |
| AD- | 431 | 453 | CAUGAAUAGGUCCAACCAGCU | AGCUGGUUGGACCUAUUCAUGCA | TGCATGAATAGGTCCAACCAGCT |
| 1381930 | | | | | |
| AD- | 433 | 455 | UGAAUAGGUCCAACCAGCUGU | ACAGCUGGUUGGACCUAUUCAUG | CATGAATAGGTCCAACCAGCTGT |
| 1381931 | | | | | |
| AD- | 434 | 456 | GAAUAGGUCCAACCAGCUGUA | UACAGCUGGUUGGACCUAUUCAU | ATGAATAGGTCCAACCAGCTGTA |
| 1381932 | | | | | |
| AD- | 435 | 457 | AAUAGGUCCAACCAGCUGUAC | GUACAGCUGGUUGGACCUAUUCA | TGAATAGGTCCAACCAGCTGTAC |
| 1381933 | | | | | |
| AD- | 436 | 458 | AUAGGUCCAACCAGCUGUACA | UGUACAGCUGGUUGGACCUAUUC | GAATAGGTCCAACCAGCTGTACA |
| 1381934 | | | | | |
| AD- | 437 | 459 | UAGGUCCAACCAGCUGUACAU | AUGUACAGCUGGUUGGACCUAUU | AATAGGTCCAACCAGCTGTACAT |
| 1381935 | | | | | |
| AD- | 438 | 460 | AGGUCCAACCAGCUGUACAUU | AAUGUACAGCUGGUUGGACCUAU | ATAGGTCCAACCAGCTGTACATT |
| 1381936 | | | | | |
| AD- | 439 | 461 | GGUCCAACCAGCUGUACAUUU | AAAUGUACAGCUGGUUGGACCUA | TAGGTCCAACCAGCTGTACATTT |
| 1381937 | | | | | |
| AD- | 440 | 462 | GUCCAACCAGCUGUACAUUUG | CAAAUGUACAGCUGGUUGGACCU | AGGTCCAACCAGCTGTACATTTG |
| 1381938 | | | | | |
| AD- | 441 | 463 | UCCAACCAGCUGUACAUUUGG | CCAAAUGUACAGCUGGUUGGACC | GGTCCAACCAGCTGTACATTTGG |
| 1381939 | | | | | |
| AD- | 442 | 464 | CCAACCAGCUGUACAUUUGGA | UCCAAAUGUACAGCUGGUUGGAC | GTCCAACCAGCTGTACATTTGGA |
| 1381940 | | | | | |
| AD- | 443 | 465 | CAACCAGCUGUACAUUUGGAA | UUCCAAAUGUACAGCUGGUUGGA | TCCAACCAGCTGTACATTTGGAA |
| 1381941 | | | | | |
| AD- | 444 | 466 | AACCAGCUGUACAUUUGGAAA | UUUCCAAAUGUACAGCUGGUUGG | CCAACCAGCTGTACATTTGGAAA |
| 1381942 | | | | | |
| AD- | 445 | 467 | ACCAGCUGUACAUUUGGAAAA | UUUUCCAAAUGUACAGCUGGUUG | CAACCAGCTGTACATTTGGAAAA |
| 1381943 | | | | | |
| AD- | 446 | 468 | CCAGCUGUACAUUUGGAAAAA | UUUUUCCAAAUGUACAGCUGGUU | AACCAGCTGTACATTTGGAAAAA |
| 1381944 | | | | | |
| AD- | 447 | 469 | CAGCUGUACAUUUGGAAAAAU | AUUUUUCCAAAUGUACAGCUGGU | ACCAGCTGTACATTTGGAAAAAT |
| 1381945 | | | | | |
| AD- | 448 | 470 | AGCUGUACAUUUGGAAAAAUA | UAUUUUUCCAAAUGUACAGCUGG | CCAGCTGTACATTTGGAAAAATA |
| 1381946 | | | | | |
| AD- | 449 | 471 | GCUGUACAUUUGGAAAAAUAA | UUAUUUUUCCAAAUGUACAGCUG | CAGCTGTACATTTGGAAAAATAA |
| 1381947 | | | | | |
| AD- | 450 | 472 | CUGUACAUUUGGAAAAAUAAA | UUUAUUUUUCCAAAUGUACAGCU | AGCTGTACATTTGGAAAAATAAA |
| 1381948 | | | | | |
| AD- | 453 | 475 | UACAUUUGGAAAAAUAAAACU | AGUUUUAUUUUUCCAAAUGUACA | TGTACATTTGGAAAAATAAAACT |
| 1381949 | | | | | |

TABLE 14
RPS25 Modified Duplex Sequences

| | | | | Start Site | End Site |
|---|---|---|---|---|---|
| Duplex Name | Sense Sequence 5′ to 3′ | Antisense Sequence 5′ to 3′ | Target Sequence 5′ to 3′ | in NM_001028.3 | in NM_00128.3 |
| AD-1381680 | csasaug(Chd)CfgCfCfUfaaggacgascsa | VPusGfsucgUfcCfUfuaggCfgGfcauugscsg | CGCAATGCCGCCTAAGGACGACA | 56 | 78 |
| AD-1381681 | asasugc(Chd)GfcCfUfAfaggacgacsasa | VPusUfsgucGfuCfCfuuagGfcGfgcauusgsc | GCAATGCCGCCTAAGGACGACAA | 57 | 79 |
| AD-1381682 | usgsccg(Chd)CfuAfAfGfgacgacaasgsa | VPusCfsuugUfcGfUfccuuAfgGfcggcasusu | AATGCCGCCTAAGGACGACAAGA | 59 | 81 |
| AD-1381683 | gscscgc(Chd)UfaAfGfGfacgacaagsasa | VPusUfscuuGfuCfGfuccuUfaGfgcggcsasu | ATGCCGCCTAAGGACGACAAGAA | 60 | 82 |
| AD-1381684 | cscsgcc(Uhd)AfaGfGfAfcgacaagasasa | VPusUfsucuUfgUfCfguccUfuAfggcggscsa | TGCCGCCTAAGGACGACAAGAAG | 61 | 83 |
| AD-1381685 | gscscua(Ahd)GfgAfCfGfacaagaagsasa | VPusUfscuuCfuUfGfucguCfcUfuaggcsgsg | CCGCCTAAGGACGACAAGAAGAA | 63 | 85 |
| AD-1381686 | cscsuaa(Ghd)GfaCfGfAfcaagaagasasa | VPusUfsucuUfcUfUfgucgUfcCfuuaggscsg | CGCCTAAGGACGACAAGAAGAAG | 64 | 86 |
| AD-1381687 | csusaag(Ghd)AfcGfAfCfaagaagaasgsa | VPusCfsuucUfuCfUfugucGfuCfcuuagsgsc | GCCTAAGGACGACAAGAAGAAGA | 65 | 87 |
| AD-1381688 | asasgga(Chd)GfaCfAfAfgaagaagasasa | VPusUfsucuUfcUfUfcuugUfcGfuccuusasg | CTAAGGACGACAAGAAGAAGAAG | 67 | 89 |
| AD-1381689 | asgsgac(Ghd)AfcAfAfGfaagaagaasgsa | VPusCfsuucUfuCfUfucuuGfuCfguccususa | TAAGGACGACAAGAAGAAGAAGG | 68 | 90 |
| AD-1381690 | gsgsacg(Ahd)CfaAfGfAfagaagaagsgsa | VPusCfscuuCfuUfCfuucuUfgUfcguccsusu | AAGGACGACAAGAAGAAGAAGGA | 69 | 91 |
| AD-1381691 | ascsgac(Ahd)AfgAfAfGfaagaaggascsa | VPusGfsuccUfuCfUfucuuCfuUfgucguscsc | GGACGACAAGAAGAAGAAGGACG | 71 | 93 |
| AD-1381692 | csgsaca(Ahd)GfaAfGfAfagaaggacsgsa | VPusCfsgucCfuUfCfuucuUfcUfugucgsusc | GACGACAAGAAGAAGAAGGACGC | 72 | 94 |
| AD-1381693 | gsascaa(Ghd)AfaGfAfAfgaaggacgscsa | VPusGfscguCfcUfUfcuucUfuCfuugucsgsu | ACGACAAGAAGAAGAAGGACGCT | 73 | 95 |
| AD-1381694 | csasaga(Ahd)GfaAfGfAfaggacgcusgsa | VPusCfsagcGfuCfCfuucuUfcUfucuugsusc | GACAAGAAGAAGAAGGACGCTGG | 75 | 97 |
| AD-1381695 | asasgaa(Ghd)AfaGfAfAfggacgcugsgsa | VPusCfscagCfgUfCfcuucUfuCfuucuusgsu | ACAAGAAGAAGAAGGACGCTGGA | 76 | 98 |
| AD-1381696 | asgsaag(Ahd)AfgAfAfGfgacgcuggsasa | VPusUfsccaGfcGfUfccuuCfuUfcuucususg | CAAGAAGAAGAAGGACGCTGGAA | 77 | 99 |
| AD-1381697 | gsasaga(Ahd)GfaAfGfGfacgcuggasasa | VPusUfsuccAfgCfGfuccuUfcUfucuucsusu | AAGAAGAAGAAGGACGCTGGAAA | 78 | 100 |
| AD-1381698 | asgsaag(Ahd)AfgGfAfCfgcuggaaasgsa | VPusCfsuuuCfcAfGfcgucCfuUfcuucususc | GAAGAAGAAGGACGCTGGAAAGT | 80 | 102 |
| AD-1381699 | gsasaga(Ahd)GfgAfCfGfcuggaaagsusa | VPusAfscuuUfcCfAfgcguCfcUfucuucsusu | AAGAAGAAGGACGCTGGAAAGTC | 81 | 103 |
| AD-1381700 | asasgaa(Ghd)GfaCfGfCfuggaaaguscsa | VPusGfsacuUfuCfCfagcgUfcCfuucuuscsu | AGAAGAAGGACGCTGGAAAGTCG | 82 | 104 |
| AD-1381701 | gsasagg(Ahd)CfgCfUfGfgaaagucgsgsa | VPusCfscgaCfuUfUfccagCfgUfccuucsusu | AAGAAGGACGCTGGAAAGTCGGC | 84 | 106 |
| AD-1381702 | asasgga(Chd)GfcUfGfGfaaagucggscsa | VPusGfsccgAfcUfUfuccaGfcGfuccuuscsu | AGAAGGACGCTGGAAAGTCGGCC | 85 | 107 |
| AD-1381703 | asgsgac(Ghd)CfuGfGfAfaagucggcscsa | VPusGfsgccGfaCfUfuuccAfgCfguccususc | GAAGGACGCTGGAAAGTCGGCCA | 86 | 108 |
| AD-1381704 | gsascgc(Uhd)GfgAfAfAfgucggccasasa | VPusUfsuggCfcGfAfcuuuCfcAfgcgucscsu | AGGACGCTGGAAAGTCGGCCAAG | 88 | 110 |
| AD-1381705 | ascsgcu(Ghd)GfaAfAfGfucggccaasgsa | VPusCfsuugGfcCfGfacuuUfcCfagcguscsc | GGACGCTGGAAAGTCGGCCAAGA | 89 | 111 |
| AD-1381706 | csgscug(Ghd)AfaAfGfUfcggccaagsasa | VPusUfscuuGfgCfCfgacuUfuCfcagcgsusc | GACGCTGGAAAGTCGGCCAAGAA | 90 | 112 |
| AD-1381707 | csusgga(Ahd)AfgUfCfGfgccaagaasasa | VPusUfsuucUfuGfGfccgaCfuUfuccagscsg | CGCTGGAAAGTCGGCCAAGAAAG | 92 | 114 |
| AD-1381708 | usgsgaa(Ahd)GfuCfGfGfccaagaaasgsa | VPusCfsuuuCfuUfGfgccgAfcUfuuccasgsc | GCTGGAAAGTCGGCCAAGAAAGA | 93 | 115 |
| AD-1381709 | gsgsaaa(Ghd)UfcGfGfCfcaagaaagsasa | VPusUfscuuUfcUfUfggccGfaCfuuuccsasg | CTGGAAAGTCGGCCAAGAAAGAC | 94 | 116 |
| AD-1381710 | asasagu(Chd)GfgCfCfAfagaaagacsasa | VPusUfsgucUfuUfCfuuggCfcGfacuuuscsc | GGAAAGTCGGCCAAGAAAGACAA | 96 | 118 |
| AD-1381711 | asasguc(Ghd)GfcCfAfAfgaaagacasasa | VPusUfsuguCfuUfUfcuugGfcCfgacuususc | GAAAGTCGGCCAAGAAAGACAAA | 97 | 119 |
| AD-1381712 | asgsucg(Ghd)CfcAfAfGfaaagacaasasa | VPusUfsuugUfcUfUfucuuGfgCfcgacususu | AAAGTCGGCCAAGAAAGACAAAG | 98 | 120 |
| AD-1381713 | uscsggc(Chd)AfaGfAfAfagacaaagsasa | VPusUfscuuUfgUfCfuuucUfuGfgccgascsu | AGTCGGCCAAGAAAGACAAAGAC | 100 | 122 |
| AD-1381714 | csgsgcc(Ahd)AfgAfAfAfgacaaagascsa | VPusGfsucuUfuGfUfcuuuCfuUfggccgsasc | GTCGGCCAAGAAAGACAAAGACC | 101 | 123 |
| AD-1381715 | gsgscca(Ahd)GfaAfAfGfacaaagacscsa | VPusGfsgucUfuUfGfucuuUfcUfuggccsgsa | TCGGCCAAGAAAGACAAAGACCC | 102 | 124 |
| AD-1381716 | csasaga(Ahd)AfgAfCfAfaagacccasgsa | VPusCfsuggGfuCfUfuuguCfuUfucuugsgsc | GCCAAGAAAGACAAAGACCCAGT | 105 | 127 |
| AD-1381717 | asasgaa(Ahd)GfaCfAfAfagacccagsusa | VPusAfscugGfgUfCfuuugUfcUfuucuusgsg | CCAAGAAAGACAAAGACCCAGTG | 106 | 128 |
| AD-1381718 | asgsaaa(Ghd)AfcAfAfAfgacccagusgsa | VPusCfsacuGfgGfUfcuuuGfuCfuuucususg | CAAGAAAGACAAAGACCCAGTGA | 107 | 129 |
| AD-1381719 | asasaga(Chd)AfaAfGfAfcccagugasasa | VPusUfsucaCfuGfGfgucuUfuGfucuuuscsu | AGAAAGACAAAGACCCAGTGAAC | 109 | 131 |
| AD-1381720 | asasgac(Ahd)AfaGfAfCfccagugaascsa | VPusGfsuucAfcUfGfggucUfuUfgucuususc | GAAAGACAAAGACCCAGTGAACA | 110 | 132 |
| AD-1381721 | asgsaca(Ahd)AfgAfCfCfcagugaacsasa | VPusUfsguuCfaCfUfggguCfuUfugucususu | AAAGACAAAGACCCAGTGAACAA | 111 | 133 |
| AD-1381722 | gsascaa(Ahd)GfaCfCfCfagugaacasasa | VPusUfsuguUfcAfCfugggUfcUfuugucsusu | AAGACAAAGACCCAGTGAACAAA | 112 | 134 |
| AD-1381723 | csasaag(Ahd)CfcCfAfGfugaacaaasusa | VPusAfsuuuGfuUfCfacugGfgUfcuuugsusc | GACAAAGACCCAGTGAACAAATC | 114 | 136 |
| AD-1381724 | asasaga(Chd)CfcAfGfUfgaacaaauscsa | VPusGfsauuUfgUfUfcacuGfgGfucuuusgsu | ACAAAGACCCAGTGAACAAATCC | 115 | 137 |
| AD-1381725 | asasgac(Chd)CfaGfUfGfaacaaaucscsa | VPusGfsgauUfuGfUfucacUfgGfgucuususg | CAAAGACCCAGTGAACAAATCCG | 116 | 138 |
| AD-1381726 | gsasccc(Ahd)GfuGfAfAfcaaauccgsgsa | VPusCfscggAfuUfUfguucAfcUfgggucsusu | AAGACCCAGTGAACAAATCCGGG | 118 | 140 |
| AD-1381727 | gsgsggg(Chd)AfaGfGfCfcaaaaagasasa | VPusUfsucuUfuUfUfggccUfuGfcccccsgsg | CCGGGGGCAAGGCCAAAAAGAAG | 136 | 158 |
| AD-1381728 | gsgsggc(Ahd)AfgGfCfCfaaaaagaasgsa | VPusCfsuucUfuUfUfuggcCfuUfgccccscsg | CGGGGGCAAGGCCAAAAAGAAGA | 137 | 159 |
| AD-1381729 | csasagg(Chd)CfaAfAfAfagaagaagsusa | VPusAfscuuCfuUfCfuuuuUfgGfccuugscsc | GGCAAGGCCAAAAAGAAGAAGTG | 141 | 163 |
| AD-1381730 | asasggc(Chd)AfaAfAfAfgaagaagusgsa | VPusCfsacuUfcUfUfcuuuUfuGfgccuusgsc | GCAAGGCCAAAAAGAAGAAGTGG | 142 | 164 |
| AD-1381731 | asgsgcc(Ahd)AfaAfAfGfaagaagugsgsa | VPusCfscacUfuCfUfucuuUfuUfggccususg | CAAGGCCAAAAAGAAGAAGTGGT | 143 | 165 |
| AD-1381732 | gscscaa(Ahd)AfaGfAfAfgaagugguscsa | VPusGfsaccAfcUfUfcuucUfuUfuuggcscsu | AGGCCAAAAAGAAGAAGTGGTCC | 145 | 167 |
| AD-1381733 | cscsaaa(Ahd)AfgAfAfGfaaguggucscsa | VPusGfsgacCfaCfUfucuuCfuUfuuuggscsc | GGCCAAAAAGAAGAAGTGGTCCA | 146 | 168 |
| AD-1381734 | csasaaa(Ahd)GfaAfGfAfagugguccsasa | VPusUfsggaCfcAfCfuucuUfcUfuuuugsgsc | GCCAAAAAGAAGAAGTGGTCCAA | 147 | 169 |
| AD-1381735 | asasaag(Ahd)AfgAfAfGfugguccaasasa | VPusUfsuugGfaCfCfacuuCfuUfcuuuususg | CAAAAAGAAGAAGTGGTCCAAAG | 149 | 171 |
| AD-1381736 | asasaga(Ahd)GfaAfGfUfgguccaaasgsa | VPusCfsuuuGfgAfCfcacuUfcUfucuuususu | AAAAAGAAGAAGTGGTCCAAAGG | 150 | 172 |
| AD-1381737 | asasgaa(Ghd)AfaGfUfGfguccaaagsgsa | VPusCfscuuUfgGfAfccacUfuCfuucuususu | AAAAGAAGAAGTGGTCCAAAGGC | 151 | 173 |
| AD-1381738 | gsasaga(Ahd)GfuGfGfUfccaaaggcsasa | VPusUfsgccUfuUfGfgaccAfcUfucuucsusu | AAGAAGAAGTGGTCCAAAGGCAA | 153 | 175 |
| AD-1381739 | asasgaa(Ghd)UfgGfUfCfcaaaggcasasa | VPusUfsugcCfuUfUfggacCfaCfuucuuscsu | AGAAGAAGTGGTCCAAAGGCAAA | 154 | 176 |
| AD-1381740 | asgsaag(Uhd)GfgUfCfCfaaaggcaasasa | VPusUfsuugCfcUfUfuggaCfcAfcuucususc | GAAGAAGTGGTCCAAAGGCAAAG | 155 | 177 |
| AD-1381741 | asasgug(Ghd)UfcCfAfAfaggcaaagsusa | VPusAfscuuUfgCfCfuuugGfaCfcacuuscsu | AGAAGTGGTCCAAAGGCAAAGTT | 157 | 179 |
| AD-1381742 | asgsugg(Uhd)CfcAfAfAfggcaaagususa | VPusAfsacuUfuGfCfcuuuGfgAfccacususc | GAAGTGGTCCAAAGGCAAAGTTC | 158 | 180 |
| AD-1381743 | gsusggu(Chd)CfaAfAfGfgcaaaguuscsa | VPusGfsaacUfuUfGfccuuUfgGfaccacsusu | AAGTGGTCCAAAGGCAAAGTTCG | 159 | 181 |
| AD-1381744 | gsgsucc(Ahd)AfaGfGfCfaaaguucgsgsa | VPusCfscgaAfcUfUfugccUfuUfggaccsasc | GTGGTCCAAAGGCAAAGTTCGGG | 161 | 183 |
| AD-1381745 | gsuscca(Ahd)AfgGfCfAfaaguucggsgsa | VPusCfsccgAfaCfUfuugcCfuUfuggacscsa | TGGTCCAAAGGCAAAGTTCGGGA | 162 | 184 |
| AD-1381746 | uscscaa(Ahd)GfgCfAfAfaguucgggsasa | VPusUfscccGfaAfCfuuugCfcUfuuggascsc | GGTCCAAAGGCAAAGTTCGGGAC | 163 | 185 |
| AD-1381747 | csasaag(Ghd)CfaAfAfGfuucgggacsasa | VPusUfsgucCfcGfAfacuuUfgCfcuuugsgsa | TCCAAAGGCAAAGTTCGGGACAA | 165 | 187 |
| AD-1381748 | asasagg(Chd)AfaAfGfUfucgggacasasa | VPusUfsuguCfcCfGfaacuUfuGfccuuusgsg | CCAAAGGCAAAGTTCGGGACAAG | 166 | 188 |
| AD-1381749 | asasggc(Ahd)AfaGfUfUfcgggacaasgsa | VPusCfsuugUfcCfCfgaacUfuUfgccuususg | CAAAGGCAAAGTTCGGGACAAGC | 167 | 189 |
| AD-1381750 | gsgscaa(Ahd)GfuUfCfGfggacaagcsusa | VPusAfsgcuUfgUfCfccgaAfcUfuugccsusu | AAGGCAAAGTTCGGGACAAGCTC | 169 | 191 |
| AD-1381751 | gscsaaa(Ghd)UfuCfGfGfgacaagcuscsa | VPusGfsagcUfuGfUfcccgAfaCfuuugcscsu | AGGCAAAGTTCGGGACAAGCTCA | 170 | 192 |
| AD-1381752 | csasaag(Uhd)UfcGfGfGfacaagcucsasa | VPusUfsgagCfuUfGfucccGfaAfcuuugscsc | GGCAAAGTTCGGGACAAGCTCAA | 171 | 193 |
| AD-1381753 | asasagu(Uhd)CfgGfGfAfcaagcucasasa | VPusUfsugaGfcUfUfguccCfgAfacuuusgsc | GCAAAGTTCGGGACAAGCTCAAT | 172 | 194 |
| AD-1381754 | asgsuuc(Ghd)GfgAfCfAfagcucaausasa | VPusUfsauuGfaGfCfuuguCfcCfgaacususu | AAAGTTCGGGACAAGCTCAATAA | 174 | 196 |
| AD-1381755 | gsusucg(Ghd)GfaCfAfAfgcucaauasasa | VPusUfsuauUfgAfGfcuugUfcCfcgaacsusu | AAGTTCGGGACAAGCTCAATAAC | 175 | 197 |
| AD-1381756 | ususcgg(Ghd)AfcAfAfGfcucaauaascsa | VPusGfsuuaUfuGfAfgcuuGfuCfccgaascsu | AGTTCGGGACAAGCTCAATAACT | 176 | 198 |
| AD-1381757 | csgsgga(Chd)AfaGfCfUfcaauaacususa | VPusAfsaguUfaUfUfgagcUfuGfucccgsasa | TTCGGGACAAGCTCAATAACTTA | 178 | 200 |
| AD-1381758 | gsgsgac(Ahd)AfgCfUfCfaauaacuusasa | VPusUfsaagUfuAfUfugagCfuUfgucccsgsa | TCGGGACAAGCTCAATAACTTAG | 179 | 201 |
| AD-1381759 | gsgsaca(Ahd)GfcUfCfAfauaacuuasgsa | VPusCfsuaaGfuUfAfuugaGfcUfuguccscsg | CGGGACAAGCTCAATAACTTAGT | 180 | 202 |
| AD-1381760 | ascsaag(Chd)UfcAfAfUfaacuuaguscsa | VPusGfsacuAfaGfUfuauuGfaGfcuuguscsc | GGACAAGCTCAATAACTTAGTCT | 182 | 204 |
| AD-1381761 | csasagc(Uhd)CfaAfUfAfacuuagucsusa | VPusAfsgacUfaAfGfuuauUfgAfgcuugsusc | GACAAGCTCAATAACTTAGTCTT | 183 | 205 |
| AD-1381762 | asasgcu(Chd)AfaUfAfAfcuuagucususa | VPusAfsagaCfuAfAfguuaUfuGfagcuusgsu | ACAAGCTCAATAACTTAGTCTTG | 184 | 206 |
| AD-1381763 | gscsuca(Ahd)UfaAfCfUfuagucuugsusa | VPusAfscaaGfaCfUfaaguUfaUfugagcsusu | AAGCTCAATAACTTAGTCTTGTT | 186 | 208 |
| AD-1381764 | csuscaa(Uhd)AfaCfUfUfagucuugususa | VPusAfsacaAfgAfCfuaagUfuAfuugagscsu | AGCTCAATAACTTAGTCTTGTTT | 187 | 209 |
| AD-1381765 | uscsaau(Ahd)AfcUfUfAfgucuuguususa | VPusAfsaacAfaGfAfcuaaGfuUfauugasgsc | GCTCAATAACTTAGTCTTGTTTG | 188 | 210 |
| AD-1381766 | asasuaa(Chd)UfuAfGfUfcuuguuugsasa | VPusUfscaaAfcAfAfgacuAfaGfuuauusgsa | TCAATAACTTAGTCTTGTTTGAC | 190 | 212 |
| AD-1381767 | asusaac(Uhd)UfaGfUfCfuuguuugascsa | VPusGfsucaAfaCfAfagacUfaAfguuaususg | CAATAACTTAGTCTTGTTTGACA | 191 | 213 |
| AD-1381768 | usasacu(Uhd)AfgUfCfUfuguuugacsasa | VPusUfsgucAfaAfCfaagaCfuAfaguuasusu | AATAACTTAGTCTTGTTTGACAA | 192 | 214 |
| AD-1381769 | ascsuua(Ghd)UfcUfUfGfuuugacaasasa | VPusUfsuugUfcAfAfacaaGfaCfuaagususa | TAACTTAGTCTTGTTTGACAAAG | 194 | 216 |
| AD-1381770 | csusuag(Uhd)CfuUfGfUfuugacaaasgsa | VPusCfsuuuGfuCfAfaacaAfgAfcuaagsusu | AACTTAGTCTTGTTTGACAAAGC | 195 | 217 |
| AD-1381771 | ususagu(Chd)UfuGfUfUfugacaaagscsa | VPusGfscuuUfgUfCfaaacAfaGfacuaasgsu | ACTTAGTCTTGTTTGACAAAGCT | 196 | 218 |
| AD-1381772 | asgsucu(Uhd)GfuUfUfGfacaaagcusasa | VPusUfsagcUfuUfGfucaaAfcAfagacusasa | TTAGTCTTGTTTGACAAAGCTAC | 198 | 220 |
| AD-1381773 | gsuscuu(Ghd)UfuUfGfAfcaaagcuascsa | VPusGfsuagCfuUfUfgucaAfaCfaagacsusa | TAGTCTTGTTTGACAAAGCTACC | 199 | 221 |
| AD-1381774 | uscsuug(Uhd)UfuGfAfCfaaagcuacscsa | VPusGfsguaGfcUfUfugucAfaAfcaagascsu | AGTCTTGTTTGACAAAGCTACCT | 200 | 222 |
| AD-1381775 | ususguu(Uhd)GfaCfAfAfagcuaccusasa | VPusUfsaggUfaGfCfuuugUfcAfaacaasgsa | TCTTGTTTGACAAAGCTACCTAT | 202 | 224 |
| AD-1381776 | usgsuuu(Ghd)AfcAfAfAfgcuaccuasusa | VPusAfsuagGfuAfGfcuuuGfuCfaaacasasg | CTTGTTTGACAAAGCTACCTATG | 203 | 225 |
| AD-1381777 | gsusuug(Ahd)CfaAfAfGfcuaccuausgsa | VPusCfsauaGfgUfAfgcuuUfgUfcaaacsasa | TTGTTTGACAAAGCTACCTATGA | 204 | 226 |
| AD-1381778 | ususuga(Chd)AfaAfGfCfuaccuaugsasa | VPusUfscauAfgGfUfagcuUfuGfucaaascsa | TGTTTGACAAAGCTACCTATGAT | 205 | 227 |
| AD-1381779 | usgsaca(Ahd)AfgCfUfAfccuaugausasa | VPusUfsaucAfuAfGfguagCfuUfugucasasa | TTTGACAAAGCTACCTATGATAA | 207 | 229 |
| AD-1381780 | gsascaa(Ahd)GfcUfAfCfcuaugauasasa | VPusUfsuauCfaUfAfgguaGfcUfuugucsasa | TTGACAAAGCTACCTATGATAAA | 208 | 230 |
| AD-1381781 | ascsaaa(Ghd)CfuAfCfCfuaugauaasasa | VPusUfsuuaUfcAfUfagguAfgCfuuuguscsa | TGACAAAGCTACCTATGATAAAC | 209 | 231 |
| AD-1381782 | asasagc(Uhd)AfcCfUfAfugauaaacsusa | VPusAfsguuUfaUfCfauagGfuAfgcuuusgsu | ACAAAGCTACCTATGATAAACTC | 211 | 233 |
| AD-1381783 | asasgcu(Ahd)CfcUfAfUfgauaaacuscsa | VPusGfsaguUfuAfUfcauaGfgUfagcuususg | CAAAGCTACCTATGATAAACTCT | 212 | 234 |
| AD-1381784 | asgscua(Chd)CfuAfUfGfauaaacucsusa | VPusAfsgagUfuUfAfucauAfgGfuagcususu | AAAGCTACCTATGATAAACTCTG | 213 | 235 |
| AD-1381785 | csusacc(Uhd)AfuGfAfUfaaacucugsusa | VPusAfscagAfgUfUfuaucAfuAfgguagscsu | AGCTACCTATGATAAACTCTGTA | 215 | 237 |
| AD-1381786 | usasccu(Ahd)UfgAfUfAfaacucugusasa | VPusUfsacaGfaGfUfuuauCfaUfagguasgsc | GCTACCTATGATAAACTCTGTAA | 216 | 238 |
| AD-1381787 | ascscua(Uhd)GfaUfAfAfacucuguasasa | VPusUfsuacAfgAfGfuuuaUfcAfuaggusasg | CTACCTATGATAAACTCTGTAAG | 217 | 239 |
| AD-1381788 | csusaug(Ahd)UfaAfAfCfucuguaagsgsa | VPusCfscuuAfcAfGfaguuUfaUfcauagsgsu | ACCTATGATAAACTCTGTAAGGA | 219 | 241 |
| AD-1381789 | usasuga(Uhd)AfaAfCfUfcuguaaggsasa | VPusUfsccuUfaCfAfgaguUfuAfucauasgsg | CCTATGATAAACTCTGTAAGGAA | 220 | 242 |
| AD-1381790 | asusgau(Ahd)AfaCfUfCfuguaaggasasa | VPusUfsuccUfuAfCfagagUfuUfaucausasg | CTATGATAAACTCTGTAAGGAAG | 221 | 243 |
| AD-1381791 | gsasuaa(Ahd)CfuCfUfGfuaaggaagsusa | VPusAfscuuCfcUfUfacagAfgUfuuaucsasu | ATGATAAACTCTGTAAGGAAGTT | 223 | 245 |
| AD-1381792 | asusaaa(Chd)UfcUfGfUfaaggaagususa | VPusAfsacuUfcCfUfuacaGfaGfuuuauscsa | TGATAAACTCTGTAAGGAAGTTC | 224 | 246 |
| AD-1381793 | usasaac(Uhd)CfuGfUfAfaggaaguuscsa | VPusGfsaacUfuCfCfuuacAfgAfguuuasusc | GATAAACTCTGTAAGGAAGTTCC | 225 | 247 |
| AD-1381794 | asascuc(Uhd)GfuAfAfGfgaaguuccscsa | VPusGfsggaAfcUfUfccuuAfcAfgaguususa | TAAACTCTGTAAGGAAGTTCCCA | 227 | 249 |
| AD-1381795 | ascsucu(Ghd)UfaAfGfGfaaguucccsasa | VPusUfsgggAfaCfUfuccuUfaCfagagususu | AAACTCTGTAAGGAAGTTCCCAA | 228 | 250 |
| AD-1381796 | csuscug(Uhd)AfaGfGfAfaguucccasasa | VPusUfsuggGfaAfCfuuccUfuAfcagagsusu | AACTCTGTAAGGAAGTTCCCAAC | 229 | 251 |
| AD-1381797 | csusgua(Ahd)GfgAfAfGfuucccaacsusa | VPusAfsguuGfgGfAfacuuCfcUfuacagsasg | CTCTGTAAGGAAGTTCCCAACTA | 231 | 253 |
| AD-1381798 | usgsuaa(Ghd)GfaAfGfUfucccaacusasa | VPusUfsaguUfgGfGfaacuUfcCfuuacasgsa | TCTGTAAGGAAGTTCCCAACTAT | 232 | 254 |
| AD-1381799 | gsusaag(Ghd)AfaGfUfUfcccaacuasusa | VPusAfsuagUfuGfGfgaacUfuCfcuuacsasg | CTGTAAGGAAGTTCCCAACTATA | 233 | 255 |
| AD-1381800 | asasgga(Ahd)GfuUfCfCfcaacuauasasa | VPusUfsuauAfgUfUfgggaAfcUfuccuusasc | GTAAGGAAGTTCCCAACTATAAA | 235 | 257 |
| AD-1381801 | asgsgaa(Ghd)UfuCfCfCfaacuauaasasa | VPusUfsuuaUfaGfUfugggAfaCfuuccususa | TAAGGAAGTTCCCAACTATAAAC | 236 | 258 |
| AD-1381802 | gsgsaag(Uhd)UfcCfCfAfacuauaaascsa | VPusGfsuuuAfuAfGfuuggGfaAfcuuccsusu | AAGGAAGTTCCCAACTATAAACT | 237 | 259 |
| AD-1381803 | asasguu(Chd)CfcAfAfCfuauaaacususa | VPusAfsaguUfuAfUfaguuGfgGfaacuuscsc | GGAAGTTCCCAACTATAAACTTA | 239 | 261 |
| AD-1381804 | asgsuuc(Chd)CfaAfCfUfauaaacuusasa | VPusUfsaagUfuUfAfuaguUfgGfgaacususc | GAAGTTCCCAACTATAAACTTAT | 240 | 262 |
| AD-1381805 | gsusucc(Chd)AfaCfUfAfuaaacuuasusa | VPusAfsuaaGfuUfUfauagUfuGfggaacsusu | AAGTTCCCAACTATAAACTTATA | 241 | 263 |
| AD-1381806 | uscscca(Ahd)CfuAfUfAfaacuuauasasa | VPusUfsuauAfaGfUfuuauAfgUfugggasasc | GTTCCCAACTATAAACTTATAAC | 243 | 265 |
| AD-1381807 | cscscaa(Chd)UfaUfAfAfacuuauaascsa | VPusGfsuuaUfaAfGfuuuaUfaGfuugggsasa | TTCCCAACTATAAACTTATAACC | 244 | 266 |
| AD-1381808 | cscsaac(Uhd)AfuAfAfAfcuuauaacscsa | VPusGfsguuAfuAfAfguuuAfuAfguuggsgsa | TCCCAACTATAAACTTATAACCC | 245 | 267 |
| AD-1381809 | ascsccc(Ahd)GfcUfGfUfggucucugsasa | VPusUfscagAfgAfCfcacaGfcUfggggususa | TAACCCCAGCTGTGGTCTCTGAG | 262 | 284 |
| AD-1381810 | cscscag(Chd)UfgUfGfGfucucugagsasa | VPusUfscucAfgAfGfaccaCfaGfcugggsgsu | ACCCCAGCTGTGGTCTCTGAGAG | 264 | 286 |
| AD-1381811 | cscsagc(Uhd)GfuGfGfUfcucugagasgsa | VPusCfsucuCfaGfAfgaccAfcAfgcuggsgsg | CCCCAGCTGTGGTCTCTGAGAGA | 265 | 287 |
| AD-1381812 | csasgcu(Ghd)UfgGfUfCfucugagagsasa | VPusUfscucUfcAfGfagacCfaCfagcugsgsg | CCCAGCTGTGGTCTCTGAGAGAC | 266 | 288 |
| AD-1381813 | gscsugu(Ghd)GfuCfUfCfugagagacsusa | VPusAfsgucUfcUfCfagagAfcCfacagcsusg | CAGCTGTGGTCTCTGAGAGACTG | 268 | 290 |
| AD-1381814 | csusgug(Ghd)UfcUfCfUfgagagacusgsa | VPusCfsaguCfuCfUfcagaGfaCfcacagscsu | AGCTGTGGTCTCTGAGAGACTGA | 269 | 291 |
| AD-1381815 | usgsugg(Uhd)CfuCfUfGfagagacugsasa | VPusUfscagUfcUfCfucagAfgAfccacasgsc | GCTGTGGTCTCTGAGAGACTGAA | 270 | 292 |
| AD-1381816 | usgsguc(Uhd)CfuGfAfGfagacugaasgsa | VPusCfsuucAfgUfCfucucAfgAfgaccascsa | TGTGGTCTCTGAGAGACTGAAGA | 272 | 294 |
| AD-1381817 | gsgsucu(Chd)UfgAfGfAfgacugaagsasa | VPusUfscuuCfaGfUfcucuCfaGfagaccsasc | GTGGTCTCTGAGAGACTGAAGAT | 273 | 295 |
| AD-1381818 | gsuscuc(Uhd)GfaGfAfGfacugaagasusa | VPusAfsucuUfcAfGfucucUfcAfgagacscsa | TGGTCTCTGAGAGACTGAAGATT | 274 | 296 |
| AD-1381819 | csuscug(Ahd)GfaGfAfCfugaagauuscsa | VPusGfsaauCfuUfCfagucUfcUfcagagsasc | GTCTCTGAGAGACTGAAGATTCG | 276 | 298 |
| AD-1381820 | uscsuga(Ghd)AfgAfCfUfgaagauucsgsa | VPusCfsgaaUfcUfUfcaguCfuCfucagasgsa | TCTCTGAGAGACTGAAGATTCGA | 277 | 299 |
| AD-1381821 | csusgag(Ahd)GfaCfUfGfaagauucgsasa | VPusUfscgaAfuCfUfucagUfcUfcucagsasg | CTCTGAGAGACTGAAGATTCGAG | 278 | 300 |
| AD-1381822 | gsasgag(Ahd)CfuGfAfAfgauucgagsgsa | VPusCfscucGfaAfUfcuucAfgUfcucucsasg | CTGAGAGACTGAAGATTCGAGGC | 280 | 302 |
| AD-1381823 | asgsaga(Chd)UfgAfAfGfauucgaggscsa | VPusGfsccuCfgAfAfucuuCfaGfucucuscsa | TGAGAGACTGAAGATTCGAGGCT | 281 | 303 |
| AD-1381824 | gsasgac(Uhd)GfaAfGfAfuucgaggcsusa | VPusAfsgccUfcGfAfaucuUfcAfgucucsusc | GAGAGACTGAAGATTCGAGGCTC | 282 | 304 |
| AD-1381825 | gsascug(Ahd)AfgAfUfUfcgaggcucscsa | VPusGfsgagCfcUfCfgaauCfuUfcagucsusc | GAGACTGAAGATTCGAGGCTCCC | 284 | 306 |
| AD-1381826 | ascsuga(Ahd)GfaUfUfCfgaggcuccscsa | VPusGfsggaGfcCfUfcgaaUfcUfucaguscsu | AGACTGAAGATTCGAGGCTCCCT | 285 | 307 |
| AD-1381827 | csusgaa(Ghd)AfuUfCfGfaggcucccsusa | VPusAfsgggAfgCfCfucgaAfuCfuucagsusc | GACTGAAGATTCGAGGCTCCCTG | 286 | 308 |
| AD-1381828 | gsasaga(Uhd)UfcGfAfGfgcucccugsgsa | VPusCfscagGfgAfGfccucGfaAfucuucsasg | CTGAAGATTCGAGGCTCCCTGGC | 288 | 310 |
| AD-1381829 | asasgau(Uhd)CfgAfGfGfcucccuggscsa | VPusGfsccaGfgGfAfgccuCfgAfaucuuscsa | TGAAGATTCGAGGCTCCCTGGCC | 289 | 311 |
| AD-1381830 | asgsauu(Chd)GfaGfGfCfucccuggcscsa | VPusGfsgccAfgGfGfagccUfcGfaaucususc | GAAGATTCGAGGCTCCCTGGCCA | 290 | 312 |
| AD-1381831 | asusucg(Ahd)GfgCfUfCfccuggccasgsa | VPusCfsuggCfcAfGfggagCfcUfcgaauscsu | AGATTCGAGGCTCCCTGGCCAGG | 292 | 314 |
| AD-1381832 | cscscug(Ghd)CfcAfGfGfgcagcccususa | VPusAfsaggGfcUfGfcccuGfgCfcagggsasg | CTCCCTGGCCAGGGCAGCCCTTC | 302 | 324 |
| AD-1381833 | cscsugg(Chd)CfaGfGfGfcagcccuuscsa | VPusGfsaagGfgCfUfgcccUfgGfccaggsgsa | TCCCTGGCCAGGGCAGCCCTTCA | 303 | 325 |
| AD-1381834 | csusggc(Chd)AfgGfGfCfagcccuucsasa | VPusUfsgaaGfgGfCfugccCfuGfgccagsgsg | CCCTGGCCAGGGCAGCCCTTCAG | 304 | 326 |
| AD-1381835 | gsgscca(Ghd)GfgCfAfGfcccuucagsgsa | VPusCfscugAfaGfGfgcugCfcCfuggccsasg | CTGGCCAGGGCAGCCCTTCAGGA | 306 | 328 |
| AD-1381836 | gscscag(Ghd)GfcAfGfCfccuucaggsasa | VPusUfsccuGfaAfGfggcuGfcCfcuggcscsa | TGGCCAGGGCAGCCCTTCAGGAG | 307 | 329 |
| AD-1381837 | cscsagg(Ghd)CfaGfCfCfcuucaggasgsa | VPusCfsuccUfgAfAfgggcUfgCfccuggscsc | GGCCAGGGCAGCCCTTCAGGAGC | 308 | 330 |
| AD-1381838 | asgsggc(Ahd)GfcCfCfUfucaggagcsusa | VPusAfsgcuCfcUfGfaaggGfcUfgcccusgsg | CCAGGGCAGCCCTTCAGGAGCTC | 310 | 332 |
| AD-1381839 | gsgsgca(Ghd)CfcCfUfUfcaggagcuscsa | VPusGfsagcUfcCfUfgaagGfgCfugcccsusg | CAGGGCAGCCCTTCAGGAGCTCC | 311 | 333 |
| AD-1381840 | gsgscag(Chd)CfcUfUfCfaggagcucscsa | VPusGfsgagCfuCfCfugaaGfgGfcugccscsu | AGGGCAGCCCTTCAGGAGCTCCT | 312 | 334 |
| AD-1381841 | csasgcc(Chd)UfuCfAfGfgagcuccususa | VPusAfsaggAfgCfUfccugAfaGfggcugscsc | GGCAGCCCTTCAGGAGCTCCTTA | 314 | 336 |
| AD-1381842 | asgsccc(Uhd)UfcAfGfGfagcuccuusasa | VPusUfsaagGfaGfCfuccuGfaAfgggcusgsc | GCAGCCCTTCAGGAGCTCCTTAG | 315 | 337 |
| AD-1381843 | gscsccu(Uhd)CfaGfGfAfgcuccuuasgsa | VPusCfsuaaGfgAfGfcuccUfgAfagggcsusg | CAGCCCTTCAGGAGCTCCTTAGT | 316 | 338 |
| AD-1381844 | cscsuuc(Ahd)GfgAfGfCfuccuuagusasa | VPusUfsacuAfaGfGfagcuCfcUfgaaggsgsc | GCCCTTCAGGAGCTCCTTAGTAA | 318 | 340 |
| AD-1381845 | csusuca(Ghd)GfaGfCfUfccuuaguasasa | VPusUfsuacUfaAfGfgagcUfcCfugaagsgsg | CCCTTCAGGAGCTCCTTAGTAAA | 319 | 341 |
| AD-1381846 | ususcag(Ghd)AfgCfUfCfcuuaguaasasa | VPusUfsuuaCfuAfAfggagCfuCfcugaasgsg | CCTTCAGGAGCTCCTTAGTAAAG | 320 | 342 |
| AD-1381847 | csasgga(Ghd)CfuCfCfUfuaguaaagsgsa | VPusCfscuuUfaCfUfaaggAfgCfuccugsasa | TTCAGGAGCTCCTTAGTAAAGGA | 322 | 344 |
| AD-1381848 | asgsgag(Chd)UfcCfUfUfaguaaaggsasa | VPusUfsccuUfuAfCfuaagGfaGfcuccusgsa | TCAGGAGCTCCTTAGTAAAGGAC | 323 | 345 |
| AD-1381849 | gsgsagc(Uhd)CfcUfUfAfguaaaggascsa | VPusGfsuccUfuUfAfcuaaGfgAfgcuccsusg | CAGGAGCTCCTTAGTAAAGGACT | 324 | 346 |
| AD-1381850 | asgscuc(Chd)UfuAfGfUfaaaggacususa | VPusAfsaguCfcUfUfuacuAfaGfgagcuscsc | GGAGCTCCTTAGTAAAGGACTTA | 326 | 348 |
| AD-1381851 | gscsucc(Uhd)UfaGfUfAfaaggacuusasa | VPusUfsaagUfcCfUfuuacUfaAfggagcsusc | GAGCTCCTTAGTAAAGGACTTAT | 327 | 349 |
| AD-1381852 | csusccu(Uhd)AfgUfAfAfaggacuuasusa | VPusAfsuaaGfuCfCfuuuaCfuAfaggagscsu | AGCTCCTTAGTAAAGGACTTATC | 328 | 350 |
| AD-1381853 | cscsuua(Ghd)UfaAfAfGfgacuuaucsasa | VPusUfsgauAfaGfUfccuuUfaCfuaaggsasg | CTCCTTAGTAAAGGACTTATCAA | 330 | 352 |
| AD-1381854 | csusuag(Uhd)AfaAfGfGfacuuaucasasa | VPusUfsugaUfaAfGfuccuUfuAfcuaagsgsa | TCCTTAGTAAAGGACTTATCAAA | 331 | 353 |
| AD-1381855 | ususagu(Ahd)AfaGfGfAfcuuaucaasasa | VPusUfsuugAfuAfAfguccUfuUfacuaasgsg | CCTTAGTAAAGGACTTATCAAAC | 332 | 354 |
| AD-1381856 | asgsuaa(Ahd)GfgAfCfUfuaucaaacsusa | VPusAfsguuUfgAfUfaaguCfcUfuuacusasa | TTAGTAAAGGACTTATCAAACTG | 334 | 356 |
| AD-1381857 | gsusaaa(Ghd)GfaCfUfUfaucaaacusgsa | VPusCfsaguUfuGfAfuaagUfcCfuuuacsusa | TAGTAAAGGACTTATCAAACTGG | 335 | 357 |
| AD-1381858 | usasaag(Ghd)AfcUfUfAfucaaacugsgsa | VPusCfscagUfuUfGfauaaGfuCfcuuuascsu | AGTAAAGGACTTATCAAACTGGT | 336 | 358 |
| AD-1381859 | asasgga(Chd)UfuAfUfCfaaacuggususa | VPusAfsaccAfgUfUfugauAfaGfuccuususa | TAAAGGACTTATCAAACTGGTTT | 338 | 360 |
| AD-1381860 | asgsgac(Uhd)UfaUfCfAfaacugguususa | VPusAfsaacCfaGfUfuugaUfaAfguccususu | AAAGGACTTATCAAACTGGTTTC | 339 | 361 |
| AD-1381861 | gsgsacu(Uhd)AfuCfAfAfacugguuuscsa | VPusGfsaaaCfcAfGfuuugAfuAfaguccsusu | AAGGACTTATCAAACTGGTTTCA | 340 | 362 |
| AD-1381862 | ascsuua(Uhd)CfaAfAfCfugguuucasasa | VPusUfsugaAfaCfCfaguuUfgAfuaaguscsc | GGACTTATCAAACTGGTTTCAAA | 342 | 364 |
| AD-1381863 | csusuau(Chd)AfaAfCfUfgguuucaasasa | VPusUfsuugAfaAfCfcaguUfuGfauaagsusc | GACTTATCAAACTGGTTTCAAAG | 343 | 365 |
| AD-1381864 | ususauc(Ahd)AfaCfUfGfguuucaaasgsa | VPusCfsuuuGfaAfAfccagUfuUfgauaasgsu | ACTTATCAAACTGGTTTCAAAGC | 344 | 366 |
| AD-1381865 | usasuca(Ahd)AfcUfGfGfuuucaaagscsa | VPusGfscuuUfgAfAfaccaGfuUfugauasasg | CTTATCAAACTGGTTTCAAAGCA | 345 | 367 |
| AD-1381866 | uscsaaa(Chd)UfgGfUfUfucaaagcascsa | VPusGfsugcUfuUfGfaaacCfaGfuuugasusa | TATCAAACTGGTTTCAAAGCACA | 347 | 369 |
| AD-1381867 | csasaac(Uhd)GfgUfUfUfcaaagcacsasa | VPusUfsgugCfuUfUfgaaaCfcAfguuugsasu | ATCAAACTGGTTTCAAAGCACAG | 348 | 370 |
| AD-1381868 | asasacu(Ghd)GfuUfUfCfaaagcacasgsa | VPusCfsuguGfcUfUfugaaAfcCfaguuusgsa | TCAAACTGGTTTCAAAGCACAGA | 349 | 371 |
| AD-1381869 | ascsugg(Uhd)UfuCfAfAfagcacagasgsa | VPusCfsucuGfuGfCfuuugAfaAfccagususu | AAACTGGTTTCAAAGCACAGAGC | 351 | 373 |
| AD-1381870 | csusggu(Uhd)UfcAfAfAfgcacagagscsa | VPusGfscucUfgUfGfcuuuGfaAfaccagsusu | AACTGGTTTCAAAGCACAGAGCT | 352 | 374 |
| AD-1381871 | usgsguu(Uhd)CfaAfAfGfcacagagcsusa | VPusAfsgcuCfuGfUfgcuuUfgAfaaccasgsu | ACTGGTTTCAAAGCACAGAGCTC | 353 | 375 |
| AD-1381872 | gsusuuc(Ahd)AfaGfCfAfcagagcucsasa | VPusUfsgagCfuCfUfgugcUfuUfgaaacscsa | TGGTTTCAAAGCACAGAGCTCAA | 355 | 377 |
| AD-1381873 | ususuca(Ahd)AfgCfAfCfagagcucasasa | VPusUfsugaGfcUfCfugugCfuUfugaaascsc | GGTTTCAAAGCACAGAGCTCAAG | 356 | 378 |
| AD-1381874 | ususcaa(Ahd)GfcAfCfAfgagcucaasgsa | VPusCfsuugAfgCfUfcuguGfcUfuugaasasc | GTTTCAAAGCACAGAGCTCAAGT | 357 | 379 |
| AD-1381875 | csasaag(Chd)AfcAfGfAfgcucaagusasa | VPusUfsacuUfgAfGfcucuGfuGfcuuugsasa | TTCAAAGCACAGAGCTCAAGTAA | 359 | 381 |
| AD-1381876 | asasagc(Ahd)CfaGfAfGfcucaaguasasa | VPusUfsuacUfuGfAfgcucUfgUfgcuuusgsa | TCAAAGCACAGAGCTCAAGTAAT | 360 | 382 |
| AD-1381877 | asasgca(Chd)AfgAfGfCfucaaguaasusa | VPusAfsuuaCfuUfGfagcuCfuGfugcuususg | CAAAGCACAGAGCTCAAGTAATT | 361 | 383 |
| AD-1381878 | gscsaca(Ghd)AfgCfUfCfaaguaauususa | VPusAfsaauUfaCfUfugagCfuCfugugcsusu | AAGCACAGAGCTCAAGTAATTTA | 363 | 385 |
| AD-1381879 | csascag(Ahd)GfcUfCfAfaguaauuusasa | VPusUfsaaaUfuAfCfuugaGfcUfcugugscsu | AGCACAGAGCTCAAGTAATTTAC | 364 | 386 |
| AD-1381880 | ascsaga(Ghd)CfuCfAfAfguaauuuascsa | VPusGfsuaaAfuUfAfcuugAfgCfucugusgsc | GCACAGAGCTCAAGTAATTTACA | 365 | 387 |
| AD-1381881 | asgsagc(Uhd)CfaAfGfUfaauuuacascsa | VPusGfsuguAfaAfUfuacuUfgAfgcucusgsu | ACAGAGCTCAAGTAATTTACACC | 367 | 389 |
| AD-1381882 | gsasgcu(Chd)AfaGfUfAfauuuacacscsa | VPusGfsgugUfaAfAfuuacUfuGfagcucsusg | CAGAGCTCAAGTAATTTACACCA | 368 | 390 |
| AD-1381883 | asgscuc(Ahd)AfgUfAfAfuuuacaccsasa | VPusUfsgguGfuAfAfauuaCfuUfgagcuscsu | AGAGCTCAAGTAATTTACACCAG | 369 | 391 |
| AD-1381884 | csuscaa(Ghd)UfaAfUfUfuacaccagsasa | VPusUfscugGfuGfUfaaauUfaCfuugagscsu | AGCTCAAGTAATTTACACCAGAA | 371 | 393 |
| AD-1381885 | uscsaag(Uhd)AfaUfUfUfacaccagasasa | VPusUfsucuGfgUfGfuaaaUfuAfcuugasgsc | GCTCAAGTAATTTACACCAGAAA | 372 | 394 |
| AD-1381886 | csasagu(Ahd)AfuUfUfAfcaccagaasasa | VPusUfsuucUfgGfUfguaaAfuUfacuugsasg | CTCAAGTAATTTACACCAGAAAT | 373 | 395 |
| AD-1381887 | asgsuaa(Uhd)UfuAfCfAfccagaaausasa | VPusUfsauuUfcUfGfguguAfaAfuuacususg | CAAGTAATTTACACCAGAAATAC | 375 | 397 |
| AD-1381888 | gsusaau(Uhd)UfaCfAfCfcagaaauascsa | VPusGfsuauUfuCfUfggugUfaAfauuacsusu | AAGTAATTTACACCAGAAATACC | 376 | 398 |
| AD-1381889 | usasauu(Uhd)AfcAfCfCfagaaauacscsa | VPusGfsguaUfuUfCfugguGfuAfaauuascsu | AGTAATTTACACCAGAAATACCA | 377 | 399 |
| AD-1381890 | asasuuu(Ahd)CfaCfCfAfgaaauaccsasa | VPusUfsgguAfuUfUfcuggUfgUfaaauusasc | GTAATTTACACCAGAAATACCAA | 378 | 400 |
| AD-1381891 | ususuac(Ahd)CfcAfGfAfaauaccaasgsa | VPusCfsuugGfuAfUfuucuGfgUfguaaasusu | AATTTACACCAGAAATACCAAGG | 380 | 402 |
| AD-1381892 | ususaca(Chd)CfaGfAfAfauaccaagsgsa | VPusCfscuuGfgUfAfuuucUfgGfuguaasasu | ATTTACACCAGAAATACCAAGGG | 381 | 403 |
| AD-1381893 | usascac(Chd)AfgAfAfAfuaccaaggsgsa | VPusCfsccuUfgGfUfauuuCfuGfguguasasa | TTTACACCAGAAATACCAAGGGT | 382 | 404 |
| AD-1381894 | csascca(Ghd)AfaAfUfAfccaagggusgsa | VPusCfsaccCfuUfGfguauUfuCfuggugsusa | TACACCAGAAATACCAAGGGTGG | 384 | 406 |
| AD-1381895 | ascscag(Ahd)AfaUfAfCfcaagggugsgsa | VPusCfscacCfcUfUfgguaUfuUfcuggusgsu | ACACCAGAAATACCAAGGGTGGA | 385 | 407 |
| AD-1381896 | cscsaga(Ahd)AfuAfCfCfaaggguggsasa | VPusUfsccaCfcCfUfugguAfuUfucuggsusg | CACCAGAAATACCAAGGGTGGAG | 386 | 408 |
| AD-1381897 | asgsaaa(Uhd)AfcCfAfAfggguggagsasa | VPusUfscucCfaCfCfcuugGfuAfuuucusgsg | CCAGAAATACCAAGGGTGGAGAT | 388 | 410 |
| AD-1381898 | gsasaau(Ahd)CfcAfAfGfgguggagasusa | VPusAfsucuCfcAfCfccuuGfgUfauuucsusg | CAGAAATACCAAGGGTGGAGATG | 389 | 411 |
| AD-1381899 | asasaua(Chd)CfaAfGfGfguggagausgsa | VPusCfsaucUfcCfAfcccuUfgGfuauuuscsu | AGAAATACCAAGGGTGGAGATGC | 390 | 412 |
| AD-1381900 | asusacc(Ahd)AfgGfGfUfggagaugcsusa | VPusAfsgcaUfcUfCfcaccCfuUfgguaususu | AAATACCAAGGGTGGAGATGCTC | 392 | 414 |
| AD-1381901 | usascca(Ahd)GfgGfUfGfgagaugcuscsa | VPusGfsagcAfuCfUfccacCfcUfugguasusu | AATACCAAGGGTGGAGATGCTCC | 393 | 415 |
| AD-1381902 | ascscaa(Ghd)GfgUfGfGfagaugcucscsa | VPusGfsgagCfaUfCfuccaCfcCfuuggusasu | ATACCAAGGGTGGAGATGCTCCA | 394 | 416 |
| AD-1381903 | csasagg(Ghd)UfgGfAfGfaugcuccasgsa | VPusCfsuggAfgCfAfucucCfaCfccuugsgsu | ACCAAGGGTGGAGATGCTCCAGC | 396 | 418 |
| AD-1381904 | asasggg(Uhd)GfgAfGfAfugcuccagscsa | VPusGfscugGfaGfCfaucuCfcAfcccuusgsg | CCAAGGGTGGAGATGCTCCAGCT | 397 | 419 |
| AD-1381905 | asgsggu(Ghd)GfaGfAfUfgcuccagcsusa | VPusAfsgcuGfgAfGfcaucUfcCfacccususg | CAAGGGTGGAGATGCTCCAGCTG | 398 | 420 |
| AD-1381906 | gsgsugg(Ahd)GfaUfGfCfuccagcugscsa | VPusGfscagCfuGfGfagcaUfcUfccaccscsu | AGGGTGGAGATGCTCCAGCTGCT | 400 | 422 |
| AD-1381907 | gsusgga(Ghd)AfuGfCfUfccagcugcsusa | VPusAfsgcaGfcUfGfgagcAfuCfuccacscsc | GGGTGGAGATGCTCCAGCTGCTG | 401 | 423 |
| AD-1381908 | usgsgag(Ahd)UfgCfUfCfcagcugcusgsa | VPusCfsagcAfgCfUfggagCfaUfcuccascsc | GGTGGAGATGCTCCAGCTGCTGG | 402 | 424 |
| AD-1381909 | gsasgau(Ghd)CfuCfCfAfgcugcuggsusa | VPusAfsccaGfcAfGfcuggAfgCfaucucscsa | TGGAGATGCTCCAGCTGCTGGTG | 404 | 426 |
| AD-1381910 | asgsaug(Chd)UfcCfAfGfcugcuggusgsa | VPusCfsaccAfgCfAfgcugGfaGfcaucuscsc | GGAGATGCTCCAGCTGCTGGTGA | 405 | 427 |
| AD-1381911 | gsasugc(Uhd)CfcAfGfCfugcuggugsasa | VPusUfscacCfaGfCfagcuGfgAfgcaucsusc | GAGATGCTCCAGCTGCTGGTGAA | 406 | 428 |
| AD-1381912 | usgscuc(Chd)AfgCfUfGfcuggugaasgsa | VPusCfsuucAfcCfAfgcagCfuGfgagcasusc | GATGCTCCAGCTGCTGGTGAAGA | 408 | 430 |
| AD-1381913 | gscsucc(Ahd)GfcUfGfCfuggugaagsasa | VPusUfscuuCfaCfCfagcaGfcUfggagcsasu | ATGCTCCAGCTGCTGGTGAAGAT | 409 | 431 |
| AD-1381914 | csuscca(Ghd)CfuGfCfUfggugaagasusa | VPusAfsucuUfcAfCfcagcAfgCfuggagscsa | TGCTCCAGCTGCTGGTGAAGATG | 410 | 432 |
| AD-1381915 | cscsagc(Uhd)GfcUfGfGfugaagaugscsa | VPusGfscauCfuUfCfaccaGfcAfgcuggsasg | CTCCAGCTGCTGGTGAAGATGCA | 412 | 434 |
| AD-1381916 | csasgcu(Ghd)CfuGfGfUfgaagaugcsasa | VPusUfsgcaUfcUfUfcaccAfgCfagcugsgsa | TCCAGCTGCTGGTGAAGATGCAT | 413 | 435 |
| AD-1381917 | asgscug(Chd)UfgGfUfGfaagaugcasusa | VPusAfsugcAfuCfUfucacCfaGfcagcusgsg | CCAGCTGCTGGTGAAGATGCATG | 414 | 436 |
| AD-1381918 | csusgcu(Ghd)GfuGfAfAfgaugcaugsasa | VPusUfscauGfcAfUfcuucAfcCfagcagscsu | AGCTGCTGGTGAAGATGCATGAA | 416 | 438 |
| AD-1381919 | usgscug(Ghd)UfgAfAfGfaugcaugasasa | VPusUfsucaUfgCfAfucuuCfaCfcagcasgsc | GCTGCTGGTGAAGATGCATGAAT | 417 | 439 |
| AD-1381920 | gscsugg(Uhd)GfaAfGfAfugcaugaasusa | VPusAfsuucAfuGfCfaucuUfcAfccagcsasg | CTGCTGGTGAAGATGCATGAATA | 418 | 440 |
| AD-1381921 | usgsgug(Ahd)AfgAfUfGfcaugaauasgsa | VPusCfsuauUfcAfUfgcauCfuUfcaccasgsc | GCTGGTGAAGATGCATGAATAGG | 420 | 442 |
| AD-1381922 | gsgsuga(Ahd)GfaUfGfCfaugaauagsgsa | VPusCfscuaUfuCfAfugcaUfcUfucaccsasg | CTGGTGAAGATGCATGAATAGGT | 421 | 443 |
| AD-1381923 | gsusgaa(Ghd)AfuGfCfAfugaauaggsusa | VPusAfsccuAfuUfCfaugcAfuCfuucacscsa | TGGTGAAGATGCATGAATAGGTC | 422 | 444 |
| AD-1381924 | usgsaag(Ahd)UfgCfAfUfgaauagguscsa | VPusGfsaccUfaUfUfcaugCfaUfcuucascsc | GGTGAAGATGCATGAATAGGTCC | 423 | 445 |
| AD-1381925 | asasgau(Ghd)CfaUfGfAfauagguccsasa | VPusUfsggaCfcUfAfuucaUfgCfaucuuscsa | TGAAGATGCATGAATAGGTCCAA | 425 | 447 |
| AD-1381926 | asgsaug(Chd)AfuGfAfAfuagguccasasa | VPusUfsuggAfcCfUfauucAfuGfcaucususc | GAAGATGCATGAATAGGTCCAAC | 426 | 448 |
| AD-1381927 | gsasugc(Ahd)UfgAfAfUfagguccaascsa | VPusGfsuugGfaCfCfuauuCfaUfgcaucsusu | AAGATGCATGAATAGGTCCAACC | 427 | 449 |
| AD-1381928 | usgscau(Ghd)AfaUfAfGfguccaaccsasa | VPusUfsgguUfgGfAfccuaUfuCfaugcasusc | GATGCATGAATAGGTCCAACCAG | 429 | 451 |
| AD-1381929 | gscsaug(Ahd)AfuAfGfGfuccaaccasgsa | VPusCfsuggUfuGfGfaccuAfuUfcaugcsasu | ATGCATGAATAGGTCCAACCAGC | 430 | 452 |
| AD-1381930 | csasuga(Ahd)UfaGfGfUfccaaccagscsa | VPusGfscugGfuUfGfgaccUfaUfucaugscsa | TGCATGAATAGGTCCAACCAGCT | 431 | 453 |
| AD-1381931 | usgsaau(Ahd)GfgUfCfCfaaccagcusgsa | VPusCfsagcUfgGfUfuggaCfcUfauucasusg | CATGAATAGGTCCAACCAGCTGT | 433 | 455 |
| AD-1381932 | gsasaua(Ghd)GfuCfCfAfaccagcugsusa | VPusAfscagCfuGfGfuuggAfcCfuauucsasu | ATGAATAGGTCCAACCAGCTGTA | 434 | 456 |
| AD-1381933 | asasuag(Ghd)UfcCfAfAfccagcugusasa | VPusUfsacaGfcUfGfguugGfaCfcuauuscsa | TGAATAGGTCCAACCAGCTGTAC | 435 | 457 |
| AD-1381934 | asusagg(Uhd)CfcAfAfCfcagcuguascsa | VPusGfsuacAfgCfUfgguuGfgAfccuaususc | GAATAGGTCCAACCAGCTGTACA | 436 | 458 |
| AD-1381935 | usasggu(Chd)CfaAfCfCfagcuguacsasa | VPusUfsguaCfaGfCfugguUfgGfaccuasusu | AATAGGTCCAACCAGCTGTACAT | 437 | 459 |
| AD-1381936 | asgsguc(Chd)AfaCfCfAfgcuguacasusa | VPusAfsuguAfcAfGfcuggUfuGfgaccusasu | ATAGGTCCAACCAGCTGTACATT | 438 | 460 |
| AD-1381937 | gsgsucc(Ahd)AfcCfAfGfcuguacaususa | VPusAfsaugUfaCfAfgcugGfuUfggaccsusa | TAGGTCCAACCAGCTGTACATTT | 439 | 461 |
| AD-1381938 | gsuscca(Ahd)CfcAfGfCfuguacauususa | VPusAfsaauGfuAfCfagcuGfgUfuggacscsu | AGGTCCAACCAGCTGTACATTTG | 440 | 462 |
| AD-1381939 | uscscaa(Chd)CfaGfCfUfguacauuusgsa | VPusCfsaaaUfgUfAfcagcUfgGfuuggascsc | GGTCCAACCAGCTGTACATTTGG | 441 | 463 |
| AD-1381940 | cscsaac(Chd)AfgCfUfGfuacauuugsgsa | VPusCfscaaAfuGfUfacagCfuGfguuggsasc | GTCCAACCAGCTGTACATTTGGA | 442 | 464 |
| AD-1381941 | csasacc(Ahd)GfcUfGfUfacauuuggsasa | VPusUfsccaAfaUfGfuacaGfcUfgguugsgsa | TCCAACCAGCTGTACATTTGGAA | 443 | 465 |
| AD-1381942 | asascca(Ghd)CfuGfUfAfcauuuggasasa | VPusUfsuccAfaAfUfguacAfgCfugguusgsg | CCAACCAGCTGTACATTTGGAAA | 444 | 466 |
| AD-1381943 | ascscag(Chd)UfgUfAfCfauuuggaasasa | VPusUfsuucCfaAfAfuguaCfaGfcuggususg | CAACCAGCTGTACATTTGGAAAA | 445 | 467 |
| AD-1381944 | cscsagc(Uhd)GfuAfCfAfuuuggaaasasa | VPusUfsuuuCfcAfAfauguAfcAfgcuggsusu | AACCAGCTGTACATTTGGAAAAA | 446 | 468 |
| AD-1381945 | csasgcu(Ghd)UfaCfAfUfuuggaaaasasa | VPusUfsuuuUfcCfAfaaugUfaCfagcugsgsu | ACCAGCTGTACATTTGGAAAAAT | 447 | 469 |
| AD-1381946 | asgscug(Uhd)AfcAfUfUfuggaaaaasusa | VPusAfsuuuUfuCfCfaaauGfuAfcagcusgsg | CCAGCTGTACATTTGGAAAAATA | 448 | 470 |
| AD-1381947 | gscsugu(Ahd)CfaUfUfUfggaaaaausasa | VPusUfsauuUfuUfCfcaaaUfgUfacagcsusg | CAGCTGTACATTTGGAAAAATAA | 449 | 471 |
| AD-1381948 | csusgua(Chd)AfuUfUfGfgaaaaauasasa | VPusUfsuauUfuUfUfccaaAfuGfuacagscsu | AGCTGTACATTTGGAAAAATAAA | 450 | 472 |
| AD-1381949 | usascau(Uhd)UfgGfAfAfaaauaaaascsa | VPusGfsuuuUfaUfUfuuucCfaAfauguascsa | TGTACATTTGGAAAAATAAAACT | 453 | 475 |

TABLE 15
RPS25 Single Dose Screen in HeLa Cells

| | Average RPS25 mRNA | |
|---|---|---|
| | Remaining | |
| Duplex | 10 nM | |
| ID | mean | SD |
| XD-18245 | 0.238 | 0.013 |
| XD-18246 | 0.131 | 0.042 |
| XD-18247 | 0.040 | 0.003 |
| XD-18248 | 0.053 | 0.007 |
| XD-18249 | 0.035 | 0.008 |
| XD-18250 | 0.049 | 0.011 |
| XD-18251 | 0.186 | 0.008 |
| XD-18252 | 0.098 | 0.022 |
| XD-18253 | 0.032 | 0.007 |
| XD-18254 | 0.048 | 0.002 |
| XD-18255 | 0.031 | 0.007 |
| XD-18256 | 0.060 | 0.011 |
| XD-18257 | 0.038 | 0.004 |
| XD-18258 | 0.058 | 0.005 |
| XD-18259 | 0.040 | 0.007 |
| XD-18260 | 0.051 | 0.009 |
| XD-18261 | 0.088 | 0.028 |
| XD-18262 | 0.039 | 0.004 |
| XD-18263 | 0.065 | 0.016 |
| XD-18264 | 0.042 | 0.003 |
| XD-18265 | 0.049 | 0.003 |
| XD-18266 | 0.058 | 0.001 |
| XD-18267 | 0.064 | 0.006 |
| XD-18268 | 0.078 | 0.007 |
| XD-18269 | 0.091 | 0.022 |
| XD-18270 | 0.078 | 0.013 |
| XD-18271 | 0.073 | 0.010 |
| XD-18272 | 0.049 | 0.011 |
| XD-18273 | 0.039 | 0.003 |
| XD-18274 | 0.121 | 0.007 |
| XD-18275 | 0.052 | 0.003 |
| XD-18276 | 0.098 | 0.011 |
| XD-18277 | 0.100 | 0.016 |
| XD-18278 | 0.036 | 0.009 |
| XD-18279 | 0.049 | 0.006 |
| XD-18280 | 0.035 | 0.003 |
| XD-18281 | 0.054 | 0.010 |
| XD-18282 | 0.395 | 0.025 |
| XD-18283 | 0.211 | 0.033 |
| XD-18284 | 0.030 | 0.010 |
| XD-18285 | 0.046 | 0.004 |
| XD-18286 | 0.064 | 0.003 |
| XD-18287 | 0.061 | 0.003 |
| XD-18288 | 0.072 | 0.031 |
| XD-18289 | 0.076 | 0.008 |
| XD-18290 | 0.055 | 0.004 |
| XD-18291 | 0.101 | 0.016 |
| XD-18292 | 0.052 | 0.003 |
| XD-18293 | 0.074 | 0.004 |
| XD-18294 | 0.043 | 0.004 |
| XD-18295 | 0.059 | 0.009 |
| XD-18296 | 0.049 | 0.003 |
| XD-18297 | 0.072 | 0.006 |
| XD-18298 | 0.271 | 0.018 |
| XD-18299 | 0.093 | 0.004 |
| XD-18300 | 0.043 | 0.003 |
| XD-18301 | 0.048 | 0.002 |
| XD-18302 | 0.081 | 0.002 |
| XD-18303 | 0.039 | 0.008 |
| XD-18304 | 0.033 | 0.004 |
| XD-18305 | 0.045 | 0.006 |
| XD-18306 | 0.046 | 0.004 |
| XD-18307 | 0.067 | 0.005 |
| XD-18308 | 0.042 | 0.004 |
| XD-18309 | 0.565 | 0.028 |
| XD-18310 | 0.118 | 0.009 |
| XD-18311 | 0.064 | 0.005 |
| XD-18312 | 0.051 | 0.005 |
| XD-18313 | 0.041 | 0.005 |
| XD-18314 | 0.039 | 0.002 |
| XD-18315 | 0.053 | 0.004 |
| XD-18316 | 0.044 | 0.002 |
| XD-18317 | 0.051 | 0.001 |
| XD-18318 | 0.052 | 0.005 |
| XD-18319 | 0.057 | 0.005 |
| XD-18320 | 0.065 | 0.009 |
| XD-18321 | 0.036 | 0.006 |
| XD-18322 | 0.028 | 0.003 |
| XD-18323 | 0.043 | 0.006 |
| XD-18324 | 0.073 | 0.008 |
| XD-18325 | 0.086 | 0.006 |
| XD-18326 | 0.038 | 0.001 |
| XD-18327 | 0.044 | 0.013 |
| XD-18328 | 0.067 | 0.002 |
| XD-18329 | 0.065 | 0.004 |
| XD-18330 | 0.467 | 0.072 |
| XD-18331 | 0.075 | 0.022 |
| XD-18332 | 0.042 | 0.003 |
| XD-18333 | 0.044 | 0.005 |
| XD-18334 | 0.075 | 0.004 |
| XD-18335 | 0.053 | 0.007 |
| XD-18336 | 0.036 | 0.004 |
| XD-18337 | 0.035 | 0.004 |
| XD-18338 | 0.043 | 0.003 |
| XD-18339 | 0.138 | 0.004 |
| XD-18340 | 0.044 | 0.002 |
| XD-18341 | 0.066 | 0.001 |
| XD-18342 | 0.052 | 0.003 |
| XD-18343 | 0.017 | 0.013 |
| XD-18344 | 0.052 | 0.024 |
| XD-18345 | 0.030 | 0.004 |
| XD-18346 | 0.033 | 0.007 |
| XD-18347 | 0.029 | 0.001 |
| XD-18348 | 0.024 | 0.010 |
| XD-18349 | 0.033 | 0.001 |
| XD-18350 | 0.040 | 0.008 |
| XD-18351 | 0.067 | 0.028 |
| XD-18352 | 0.043 | 0.026 |
| XD-18353 | 0.052 | 0.002 |
| XD-18354 | 0.028 | 0.015 |
| XD-18355 | 0.038 | 0.006 |
| XD-18356 | 0.071 | 0.009 |
| XD-18357 | 0.062 | 0.001 |
| XD-18358 | 0.044 | 0.001 |
| XD-18359 | 0.059 | 0.021 |
| XD-18360 | 0.046 | 0.003 |
| XD-18361 | 0.033 | 0.003 |
| XD-18362 | 0.070 | 0.007 |
| XD-18363 | 0.033 | 0.005 |
| XD-18364 | 0.034 | 0.001 |
| XD-18365 | 0.035 | 0.010 |
| XD-18366 | 0.030 | 0.003 |
| XD-18367 | 0.104 | 0.005 |
| XD-18368 | 0.030 | 0.005 |
| XD-18369 | 0.041 | 0.008 |
| XD-18370 | 0.045 | 0.008 |
| XD-18371 | 0.044 | 0.005 |
| XD-18372 | 0.036 | 0.002 |
| XD-18373 | 0.481 | 0.016 |
| XD-18374 | 0.081 | 0.004 |
| XD-18375 | 0.052 | 0.002 |
| XD-18376 | 0.047 | 0.002 |
| XD-18377 | 0.053 | 0.011 |
| XD-18378 | 0.213 | 0.037 |
| XD-18379 | 0.449 | 0.007 |
| XD-18380 | 0.063 | 0.015 |
| XD-18381 | 0.044 | 0.002 |
| XD-18382 | 0.046 | 0.014 |
| XD-18383 | 0.042 | 0.007 |
| XD-18384 | 0.040 | 0.002 |
| XD-18385 | 0.031 | 0.013 |
| XD-18386 | 0.036 | 0.006 |
| XD-18387 | 0.038 | 0.006 |
| XD-18388 | 0.092 | 0.008 |
| XD-18389 | 0.051 | 0.006 |
| XD-18390 | 0.084 | 0.011 |
| XD-18391 | 0.385 | 0.042 |
| XD-18392 | 0.063 | 0.010 |
| XD-18393 | 0.319 | 0.017 |
| XD-18394 | 0.196 | 0.011 |
| XD-18395 | 0.731 | 0.029 |
| XD-18396 | 0.919 | 0.019 |
| XD-18397 | 0.704 | 0.022 |
| XD-18398 | 0.170 | 0.016 |
| XD-18399 | 0.148 | 0.026 |
| XD-18400 | 0.129 | 0.019 |
| XD-18401 | 0.104 | 0.025 |
| XD-18402 | 0.044 | 0.003 |
| XD-18403 | 0.063 | 0.005 |
| XD-18404 | 0.063 | 0.004 |
| XD-18405 | 0.050 | 0.003 |
| XD-18406 | 0.046 | 0.004 |
| XD-18407 | 0.041 | 0.009 |
| XD-18408 | 0.063 | 0.008 |
| XD-18409 | 0.064 | 0.016 |
| XD-18410 | 0.048 | 0.001 |
| XD-18411 | 0.069 | 0.005 |
| XD-18412 | 0.045 | 0.003 |
| XD-18413 | 0.082 | 0.007 |
| XD-18414 | 0.340 | 0.036 |
| XD-18415 | 0.035 | 0.002 |
| XD-18416 | 0.045 | 0.004 |
| XD-18417 | 0.029 | 0.006 |
| XD-18418 | 0.055 | 0.007 |
| XD-18419 | 0.044 | 0.005 |
| XD-18420 | 0.044 | 0.002 |
| XD-18421 | 0.061 | 0.006 |
| XD-18422 | 0.065 | 0.006 |
| XD-18423 | 0.065 | 0.009 |
| XD-18424 | 0.034 | 0.010 |
| XD-18425 | 0.037 | 0.003 |
| XD-18426 | 0.040 | 0.006 |
| XD-18427 | 0.037 | 0.005 |
| XD-18428 | 0.052 | 0.007 |
| XD-18429 | 0.133 | 0.038 |
| XD-18430 | 0.153 | 0.012 |
| XD-18431 | 0.044 | 0.006 |
| XD-18432 | 0.058 | 0.015 |
| XD-18433 | 0.076 | 0.005 |
| XD-18434 | 0.043 | 0.006 |
| XD-18435 | 0.034 | 0.002 |
| XD-18436 | 0.030 | 0.002 |
| XD-18437 | 0.069 | 0.003 |
| XD-18438 | 0.048 | 0.011 |
| XD-18439 | 0.041 | 0.006 |
| XD-18440 | 0.039 | 0.010 |
| XD-18441 | 0.028 | 0.004 |
| XD-18442 | 0.026 | 0.003 |
| XD-18443 | 0.048 | 0.008 |
| XD-18444 | 0.047 | 0.006 |
| XD-18445 | 0.045 | 0.005 |
| XD-18446 | 0.042 | 0.002 |
| XD-18447 | 0.062 | 0.003 |
| XD-18448 | 0.056 | 0.001 |
| XD-18449 | 0.060 | 0.005 |
| XD-18450 | 0.068 | 0.006 |
| XD-18451 | 0.050 | 0.006 |
| XD-18452 | 0.066 | 0.005 |
| XD-18453 | 0.048 | 0.006 |
| XD-18454 | 0.132 | 0.012 |
| XD-18455 | 0.135 | 0.010 |
| XD-18456 | 0.214 | 0.014 |
| XD-18457 | 0.066 | 0.006 |
| XD-18458 | 0.051 | 0.012 |
| XD-18459 | 0.050 | 0.005 |
| XD-18460 | 0.048 | 0.005 |
| XD-18461 | 0.063 | 0.004 |
| XD-18462 | 0.044 | 0.003 |
| XD-18463 | 0.066 | 0.010 |
| XD-18464 | 0.054 | 0.007 |
| XD-18465 | 0.087 | 0.009 |
| XD-18466 | 0.057 | 0.004 |
| XD-18467 | 0.038 | 0.004 |
| XD-18468 | 0.110 | 0.008 |
| XD-18469 | 0.060 | 0.016 |
| XD-18470 | 0.070 | 0.004 |
| XD-18471 | 0.112 | 0.029 |
| XD-18472 | 0.074 | 0.024 |
| XD-18473 | 0.107 | 0.005 |
| XD-18474 | 0.145 | 0.024 |
| XD-18475 | 0.120 | 0.016 |
| XD-18476 | 0.064 | 0.008 |
| XD-18477 | 0.102 | 0.004 |
| XD-18478 | 0.077 | 0.009 |
| XD-18479 | 0.041 | 0.005 |
| XD-18480 | 0.045 | 0.002 |
| XD-18481 | 0.039 | 0.003 |
| XD-18482 | 0.049 | 0.009 |
| XD-18483 | 0.042 | 0.007 |
| XD-18484 | 0.036 | 0.004 |
| XD-18485 | 0.039 | 0.001 |
| XD-18486 | 0.067 | 0.002 |
| XD-18487 | 0.174 | 0.044 |
| XD-18488 | 0.047 | 0.004 |
| XD-18489 | 0.140 | 0.044 |
| XD-18490 | 0.048 | 0.006 |
| XD-18491 | 0.057 | 0.004 |
| XD-18492 | 0.125 | 0.017 |
| XD-18493 | 0.101 | 0.011 |
| XD-18494 | 0.049 | 0.011 |
| XD-18495 | 0.086 | 0.006 |
| XD-18496 | 0.079 | 0.006 |
| XD-18497 | 0.084 | 0.006 |
| XD-18498 | 0.313 | 0.008 |
| XD-18499 | 0.079 | 0.004 |
| XD-18500 | 0.093 | 0.005 |
| XD-18501 | 0.133 | 0.005 |
| XD-18502 | 0.114 | 0.005 |
| XD-18503 | 0.075 | 0.003 |
| XD-18504 | 0.073 | 0.002 |
| XD-18505 | 0.078 | 0.014 |
| XD-18506 | 0.075 | 0.008 |
| XD-18507 | 0.064 | 0.003 |
| XD-18508 | 0.064 | 0.008 |
| XD-18509 | 0.052 | 0.005 |
| XD-18510 | 0.062 | 0.006 |
| XD-18511 | 0.072 | 0.002 |
| XD-18512 | 0.067 | 0.006 |
| XD-18513 | 0.057 | 0.017 |
| XD-18514 | 0.048 | 0.005 |
| XD-00376 | 0.910 | 0.049 |
| XD-00033 | 0.976 | 0.060 |
| XD-00033 | 0.067 | 0.002 |

### Example 2. In Vivo Evaluation in Transgenic Mice

[0765] This Example describes methods for the in vivo evaluation of RPS25 RNAi agents in a transgenic mouse model of a nucleotide repeat expansion disease, C9ORF72 ALS/FTD (a transgenic mouse model expressing human C9orf72 RNAs with up to, e.g., 450 GGGGCC repeats (SEQ ID NO: 17); see, e.g., Jiang, et al. (2016) Neuron 90:535-550).

[0766] The ability of selected dsRNA agents designed and assayed in Example 1 are assessed for their ability to reduce the level of both sense- or antisense-containing foci in mice expressing human C9orf72 RNAs with up to 450 GGGGCC repeats (SEQ ID NO: 17).

[0767] Briefly, control littermates, mice heterozygous for the human C9orf72 RNA with up to 450 GGGGCC repeats (SEQ ID NO: 17), and mice homozygous for the human C9orf72 RNA with up to 450 GGGGCC repeats (SEQ ID NO: 17) are administered intrathecally or subcutaneously a single dose of the dsRNA agents of interest, or a placebo. Two weeks post-administration, animals are sacrificed, blood and tissue samples, including cerebral cortex, spinal cord, liver, spleen, and cervical lymph nodes, are collected.

[0768] There are three C9orf72 transcripts generated by differential use of transcription alternative start and termination sites generates. Therefore, to determine the effect of administration of the dsRNA agents targeting RPS25 on the level of detrimental repeat-containing mRNA, the levels of repeat-containing C9orf 72 mRNA, total C9orf72 mRNA, and exon 1b-containing, mRNA levels are determined in cortex and spinal cord samples by qRT-PCR (see, e.g., above and Jiang, supra).

[0769] The results demonstrate that administration of a single dose of the dsRNA agents targeting RPS25 inhibits the production of repeat-containing C9orf 72 mRNA, the level of total C9orf72 mRNA and the level of exon 1b-containing mRNA levels.

[0770] In order to determine the effect of the dsRNA agents targeting RPS25 to reduce the number and/or formation of both C9ORF72 sense strand- and antisense strand-containing foci, the FISH methods described in Jiang, supra are employed in samples obtained from the animals administered the duplexes of interest from above. The probes that are used include those that are against the sense and antisense RNA hexanucleotide repeat (Exiqon, Inc.). All hybridization steps are performed under RNase-free conditions. Fifteen micrometer brain and spinal cord OCT frozen sections are permeabilized and the sections are blocked. The sections are then hybridized with denatured probes. After hybridization, slides are washed. Autofluorescence of lipofuscin is quenched and cell nuclei are stained with DAPI. Quantitation of sense and antisense RNA foci in mouse frontal cortex, hippocampal dentate gyrus, retrosplenial cortex and cerebellar molecular layer is performed by a blinded investigator. Three to six random pictures are taken by confocal microscopy under 100× magnification and 200-400 cells are counted.

[0771] The results demonstrate that administration of a single dose of the dsRNA agents targeting RPS25 reduce the level of C9orf72 sense strand- and C9orf72 antisense strand-containing foci in the frontal cortex, hippocampal dentate gyrus, retrosplenial cortex and cerebellar molecular layer.

[0772] The effect of administration of the agents targeting RPS25 on the level of aberrant dipeptide repeat protein level and poly(GP) and poly(GA) burden and size is also assessed as described in, for example, Jiang, supra) in the animals administered the duplexes of interest above.

[0773] Immunohistochemistry is used to identify and assess aberrant dipeptide repeat protein level in mouse hemibrain and spinal cord. Briefly, eight to ten micron thick sagittal slices of mouse hemibrain or coronal slices of spinal cord are cut from formalin-fixed, paraffin-embedded blocks and mounted on glass slides. After drying, slides are deparaffinized and rehydrated in xylene and alcohol washes before washing. Then slides are steamed and blocked. After staining with commercially available antibodies against poly(GP), poly(GA), poly(GR), poly(PA), poly(PR), GFAP, IBA-1, CD3, F4/80, and CD45R/B220 overnight, HRP-conjugated secondary antibody is applied and peroxidase activity is developed with substrate. Sections are counterstained with Harris' modified hematoxylin and coverslipped.

[0774] To quantify poly(GP) and poly(GA) inclusion burden and size, mice hemibrain sections immunostained for poly(GP) or poly(GA) are scanned at 40× magnification to obtain high-resolution digitized images. Using suitable software, the number of inclusions in the hippocampus or a delineated area in the retrosplenial cortex are counted. To measure the size of inclusions in these regions, images are taken with a microscope under 63× magnification. Although each inclusion in a given field is only analyzed once, multiple images of the field may be taken to ensure the analysis is done only on inclusions that are in focus. Images are opened and enlarged, and an outline tool is used to trace each inclusion to determine its area (μm²). For each mouse, the average size of inclusions in μm2 within each tested region is calculated.

[0775] The data is used to determine whether administration of a single dose of the dsRNA agents targeting RPS25 reduces the level of aberrant dipeptide repeat protein levels, in particular the level of poly(GP) and poly(GA) inclusion burden and size.

INFORMAL SEQUENCE LISTING

SEQ ID NO: 1
>NM_001028.3 Homo sapiens ribosomal protein S25 (RPS25), mRNA
CTTTTTGTCCGACATCTTGACGAGGCTGCGGTGTCTGCTGCTATTCTCCGAGCTTCGCAATGCCGCCTAA
GGACGACAAGAAGAAGAAGGACGCTGGAAAGTCGGCCAAGAAAGACAAAGACCCAGTGAACAAATCCGGG
GGCAAGGCCAAAAAGAAGAAGTGGTCCAAAGGCAAAGTTCGGGACAAGCTCAATAACTTAGTCTTGTTTG
ACAAAGCTACCTATGATAAACTCTGTAAGGAAGTTCCCAACTATAAACTTATAACCCCAGCTGTGGTCTC
TGAGAGACTGAAGATTCGAGGCTCCCTGGCCAGGGCAGCCCTTCAGGAGCTCCTTAGTAAAGGACTTATC
AAACTGGTTTCAAAGCACAGAGCTCAAGTAATTTACACCAGAAATACCAAGGGTGGAGATGCTCCAGCTG
CTGGTGAAGATGCATGAATAGGTCCAACCAGCTGTACATTTGGAAAAATAAAACTTTATTAAA
SEQ ID NO: 2
Reverse Complement of SEQ ID NO: 1
TTTAATAAAGTTTTATTTTTCCAAATGTACAGCTGGTTGGACCTATTCATGCATCTTCACCAGCAGCTGGAGCAT
CTCCACCCTTGGTATTTCTGGTGTAAATTACTTGAGCTCTGTGCTTTGAAACCAGTTTGATAAGTCCTTTACTAA
GGAGCTCCTGAAGGGCTGCCCTGGCCAGGGAGCCTCGAATCTTCAGTCTCTCAGAGACCACAGCTGGGGTTATAA
GTTTATAGTTGGGAACTTCCTTACAGAGTTTATCATAGGTAGCTTTGTCAAACAAGACTAAGTTATTGAGCTTGT
CCCGAACTTTGCCTTTGGACCACTTCTTCTTTTTGGCCTTGCCCCCGGATTTGTTCACTGGGTCTTTGTCTTTCT
TGGCCGACTTTCCAGCGTCCTTCTTCTTCTTGTCGTCCTTAGGCGGCATTGCGAAGCTCGGAGAATAGCAGCAGA
CACCGCAGCCTCGTCAAGATGTCGGACAAAAAG
SEQ ID NO: 3
>NM_024266.3 Mus musculus ribosomal protein S25 (Rps25), mRNA
AGCGAGGCTGCTGTGGTCTACACGACTCTCTGAGCTTCGCCATGCCTCCCAAAGACGACAAGAAGAAGAA
AGATGCCGGAAAGTCGGCCAAAAAGGATAAAGACCCAGTAAATAAATCTGGTGGCAAGGCCAAGAAGAAG
AAGTGGTCCAAAGGCAAAGTTCGGGACAAGTTGAACAATCTTGTCCTGTTCGACAAAGCGACATACGACA
AGCTCTGTAAGGAGGTTCCGAACTATAAGCTTATTACTCCAGCCGTGGTCTCTGAGAGACTGAAGATTCG
CGGTTCCTTGGCCAGGGCAGCCCTTCAGGAGCTCCTTAGTAAAGGACTTATCAAGCTGGTTTCAAAGCAC
AGAGCCCAAGTAATTTACACCAGAAACACAAAGGGTGGGGACGCTCCAGCTGCTGGCGAAGATGCATGAA
CAGGTTCAATCAGCTGTACATTTGGAAAAATAAAACTTTATTGAATCAAATGAATGGGTGCATCTGTTTC
CTAAGGCAGCCGGGGAGGATTTGGTCTTAGGAATAATAGCTGGAATTGGTTTGTTGGCCATGAAGTCAGA
TGCAATTGCGCCTGGGAACCTTCAGCTTTTCCCTTTACGTGGTTGCTTGCTTCTTGTTGCAGCTTCGGTT
TTGAATTGATGCCTGAAAGAAAATAAAAACTTAGCAAGACTAATGGTAAATCTAAAAAAAAAAAAAAAAA
A
SEQ ID NO: 4
Reverse Complement of SEQ ID NO: 3
TTTTTTTTTTTTTTTTTTAGATTTACCATTAGTCTTGCTAAGTTTTTATTTTCTTTCAGGCATCAATTCAAAACC
GAAGCTGCAACAAGAAGCAAGCAACCACGTAAAGGGAAAAGCTGAAGGTTCCCAGGCGCAATTGCATCTGACTTC
ATGGCCAACAAACCAATTCCAGCTATTATTCCTAAGACCAAATCCTCCCCGGCTGCCTTAGGAAACAGATGCACC
CATTCATTTGATTCAATAAAGTTTTATTTTTCCAAATGTACAGCTGATTGAACCTGTTCATGCATCTTCGCCAGC
AGCTGGAGCGTCCCCACCCTTTGTGTTTCTGGTGTAAATTACTTGGGCTCTGTGCTTTGAAACCAGCTTGATAAG
TCCTTTACTAAGGAGCTCCTGAAGGGCTGCCCTGGCCAAGGAACCGCGAATCTTCAGTCTCTCAGAGACCACGGC
TGGAGTAATAAGCTTATAGTTCGGAACCTCCTTACAGAGCTTGTCGTATGTCGCTTTGTCGAACAGGACAAGATT
GTTCAACTTGTCCCGAACTTTGCCTTTGGACCACTTCTTCTTCTTGGCCTTGCCACCAGATTTATTTACTGGGTC
TTTATCCTTTTTGGCCGACTTTCCGGCATCTTTCTTCTTCTTGTCGTCTTTGGGAGGCATGGCGAAGCTCAGAGA
GTCGTGTAGACCACAGCAGCCTCGCT
SEQ ID NO: 5
>NM_001005528.1 Rattus norvegicus ribosomal protein s25 (Rps25), mRNA
TGTGGCTGCAGTGGTCCACACTACTCTCTGAGTTTCGCCATGCCGCCCAAAGACGACAAGAAGAAGAAGG
ATGCCGGAAAGTCGGCCAAAAAAGACAAGGACCCAGTAAATAAATCTGGTGGCAAGGCCAAAAAGAAGAA
GTGGTCCAAAGGCAAAGTTCGGGACAAGCTGAACAATCTCGTCCTGTTTGACAAAGCTACTTACGACAAA
CTTTGTAAGGAAGTTCCCAACTATAAGCTTATTACTCCAGCTGTGGTCTCCGAGAGACTGAAGATTCGAG
GTTCCTTGGCCAGGGCAGCCCTTCAGGAGCTACTTAGTAAAGGACTTATCAAGCTGGTTTCAAAGCACAG
AGCCCAAGTAATTTACACCAGAAACACAAAGGGTGGAGATGCCCCAGCTGCTGGTGAAGATGCATAAACA
GATTGAATCAGCTGTACATTTGGGAAAATAAAACTTTATTGAATCA
SEQ ID NO: 6
Reverse Complement of SEQ ID NO: 5
TGATTCAATAAAGTTTTATTTTCCCAAATGTACAGCTGATTCAATCTGTTTATGCATCTTCACCAGCAGCTGGGG
CATCTCCACCCTTTGTGTTTCTGGTGTAAATTACTTGGGCTCTGTGCTTTGAAACCAGCTTGATAAGTCCTTTAC
TAAGTAGCTCCTGAAGGGCTGCCCTGGCCAAGGAACCTCGAATCTTCAGTCTCTCGGAGACCACAGCTGGAGTAA
TAAGCTTATAGTTGGGAACTTCCTTACAAAGTTTGTCGTAAGTAGCTTTGTCAAACAGGACGAGATTGTTCAGCT
TGTCCCGAACTTTGCCTTTGGACCACTTCTTCTTTTTGGCCTTGCCACCAGATTTATTTACTGGGTCCTTGTCTT
TTTTGGCCGACTTTCCGGCATCCTTCTTCTTCTTGTCGTCTTTGGGCGGCATGGCGAAACTCAGAGAGTAGTGTG
GACCACTGCAGCCACA
SEQ ID NO: 7
>XM_015115940.1 PREDICTED: Macaca mulatta ribosomal protein S25 (RPS25),
mRNA
GCACCTGCGGCGCCTGCGCATTGGGAGCGACACGCTCGGGCATAAGTAGTGCCGGAAAGTTAGTTGCCGA
GACCTGGTGGATTGTTTTCCGTTTATCAGTGCCGGAAAACAGTACTACAGTACTGCGTCACAACTAGCCC
GGACTCCGACAACCTGGCGCGGTATTTAGGCGGTGCGGCTTGGGAACTAGAATTCACTTCCTGTCTTCCT
CTTGAGGCTAGAGGGCGAGCACTTCGCCGTGGGACTTCCTCCGCCTGGCTCCGCCTCTTGCCCCGGAAGT
ACTTACAGCGGACGGAGGTTTCTGGGCCCGTTTCTGAGCAGCGCTTCCTTTTTGTCCGACATCTTAGCAA
GCCTGCGGTGTCTGCTGCTGCTCCCCGAGCTTCGCAATGCCGCCCAAGGACGACAAGAAGAAGAAGGACG
CCGGAAAGTCGGCCAAGAAAGACAAAGACCCAGTGAACAAATCTGGGGGCAAGGCCAAAAAGAAGAAGTG
GTCCAAAGGCAAAGTTCGGGACAAGCTCAATAACTTAGTCTTGTTTGACAAAGCTACCTACGACAAACTC
TGTAAGGAAGTTCCCAACTATAAACTTATAACCCCAGCTGTAGTCTCTGAGAGACTGAAGATTCGAGGCT
CCCTGGCCAGGGCAGCCCTTCAGGAGCTCCTTAGTAAAGGACTTATCAAACTGGTTTCAAAGCACAGAGC
TCAAGTAATTTACACCAGAAATACCAAGGGCGGAGATGCTCCAGCTGCTGGTGAAGATGCATGAATAGGT
CCAACCAATTGTACATTTGGAAAAATAAAACTATTAAATCAAA
SEQ ID NO: 8
Reverse Complement of SEQ ID NO: 7
TTTGATTTAATAGTTTTATTTTTCCAAATGTACAATTGGTTGGACCTATTCATGCATCTTCACCAGCAGCTGGAG
CATCTCCGCCCTTGGTATTTCTGGTGTAAATTACTTGAGCTCTGTGCTTTGAAACCAGTTTGATAAGTCCTTTAC
TAAGGAGCTCCTGAAGGGCTGCCCTGGCCAGGGAGCCTCGAATCTTCAGTCTCTCAGAGACTACAGCTGGGGTTA
TAAGTTTATAGTTGGGAACTTCCTTACAGAGTTTGTCGTAGGTAGCTTTGTCAAACAAGACTAAGTTATTGAGCT
TGTCCCGAACTTTGCCTTTGGACCACTTCTTCTTTTTGGCCTTGCCCCCAGATTTGTTCACTGGGTCTTTGTCTT
TCTTGGCCGACTTTCCGGCGTCCTTCTTCTTCTTGTCGTCCTTGGGCGGCATTGCGAAGCTCGGGGAGCAGCAGC
AGACACCGCAGGCTTGCTAAGATGTCGGACAAAAAGGAAGCGCTGCTCAGAAACGGGCCCAGAAACCTCCGTCCG
CTGTAAGTACTTCCGGGGCAAGAGGCGGAGCCAGGCGGAGGAAGTCCCACGGCGAAGTGCTCGCCCTCTAGCCTC
AAGAGGAAGACAGGAAGTGAATTCTAGTTCCCAAGCCGCACCGCCTAAATACCGCGCCAGGTTGTCGGAGTCCGG
GCTAGTTGTGACGCAGTACTGTAGTACTGTTTTCCGGCACTGATAAACGGAAAACAATCCACCAGGTCTCGGCAA
CTAACTTTCCGGCACTACTTATGCCCGAGCGTGTCGCTCCCAATGCGCAGGCGCCGCAGGTGC
SEQ ID NO: 9
>NM_001285107.1 Macaca fascicularis ribosomal protein S25 (RPS25), mRNA
CTTTTTGTCCGACATCTTAGCAAGCCAGCGGTGTCTGCTGCTGCTCCCCGAGCTTCGCAATGCCGCCCAA
GGACGACAAGAAGAAGGAGGACGCCGGAAAGTCGGCCAAGAAAGACAAAGACCCAGTGAACAAATCTGGG
GGCAAGGCCAAAAAGAAGAAGTGGTCCAAAGGCAAAGTTCGGGACAAGCTCAATAACTTAGTCTTGTTTG
ACAAAGCTACCTACGACAAACTCTGTAAGGAAGTTCCCAACTATAAACTTATAACCCCAGCTGTAGTCTC
TGAGAGACTGAAGATTCGAGGCTCCCTGGCCAGGGCAGCCCTTCAGGAGCTCCTTAGTAAAGGACTTATC
AAACTGGTTTCAAAGCACAGAGCTCAAGTAATTTACACCAGAAATACCAAGGGCGGAGATGCTCCAGCTG
CTGGTGAAGATGCATGAATAGGTCCAACCAATTGTACATTTGGAAAAATAAAACTTTATTAAATCAAAAA
AAAAAAAAAAA
SEQ ID NO: 10
Reverse Complement of SEQ ID NO:9
TTTTTTTTTTTTTTTTGATTTAATAAAGTTTTATTTTTCCAAATGTACAATTGGTTGGACCTATTCATGCATCTT
CACCAGCAGCTGGAGCATCTCCGCCCTTGGTATTTCTGGTGTAAATTACTTGAGCTCTGTGCTTTGAAACCAGTT
TGATAAGTCCTTTACTAAGGAGCTCCTGAAGGGCTGCCCTGGCCAGGGAGCCTCGAATCTTCAGTCTCTCAGAGA
CTACAGCTGGGGTTATAAGTTTATAGTTGGGAACTTCCTTACAGAGTTTGTCGTAGGTAGCTTTGTCAAACAAGA
CTAAGTTATTGAGCTTGTCCCGAACTTTGCCTTTGGACCACTTCTTCTTTTTGGCCTTGCCCCCAGATTTGTTCA
CTGGGTCTTTGTCTTTCTTGGCCGACTTTCCGGCGTCCTCCTTCTTCTTGTCGTCCTTGGGCGGCATTGCGAAGC
TCGGGGAGCAGCAGCAGACACCGCTGGCTTGCTAAGATGTCGGACAAAAAG
SEQ ID NO: 11
>NM_145005.6 Homo sapiens C9orf72-SMCR8 complex subunit (C9orf72),
transcript variant 1, mRNA
ACGTAACCTACGGTGTCCCGCTAGGAAAGAGAGGTGCGTCAAACAGCGACAAGTTCCGCCCACGTAAAAG
ATGACGCTTGATATCTCCGGAGCATTTGGATAATGTGACAGTTGGAATGCAGTGATGTCGACTCTTTGCC
CACCGCCATCTCCAGCTGTTGCCAAGACAGAGATTGCTTTAAGTGGCAAATCACCTTTATTAGCAGCTAC
TTTTGCTTACTGGGACAATATTCTTGGTCCTAGAGTAAGGCACATTTGGGCTCCAAAGACAGAACAGGTA
CTTCTCAGTGATGGAGAAATAACTTTTCTTGCCAACCACACTCTAAATGGAGAAATCCTTCGAAATGCAG
AGAGTGGTGCTATAGATGTAAAGTTTTTTGTCTTGTCTGAAAAGGGAGTGATTATTGTTTCATTAATCTT
TGATGGAAACTGGAATGGGGATCGCAGCACATATGGACTATCAATTATACTTCCACAGACAGAACTTAGT
TTCTACCTCCCACTTCATAGAGTGTGTGTTGATAGATTAACACATATAATCCGGAAAGGAAGAATATGGA
TGCATAAGGAAAGACAAGAAAATGTCCAGAAGATTATCTTAGAAGGCACAGAGAGAATGGAAGATCAGGG
TCAGAGTATTATTCCAATGCTTACTGGAGAAGTGATTCCTGTAATGGAACTGCTTTCATCTATGAAATCA
CACAGTGTTCCTGAAGAAATAGATATAGCTGATACAGTACTCAATGATGATGATATTGGTGACAGCTGTC
ATGAAGGCTTTCTTCTCAAGTAAGAATTTTTCTTTTCATAAAAGCTGGATGAAGCAGATACCATCTTATG
CTCACCTATGACAAGATTTGGAAGAAAGAAAATAACAGACTGTCTACTTAGATTGTTCTAGGGACATTAC
GTATTTGAACTGTTGCTTAAATTTGTGTTATTTTTCACTCATTATATTTCTATATATATTTGGTGTTATT
CCATTTGCTATTTAAAGAAACCGAGTTTCCATCCCAGACAAGAAATCATGGCCCCTTGCTTGATTCTGGT
TTCTTGTTTTACTTCTCATTAAAGCTAACAGAATCCTTTCATATTAAGTTGTACTGTAGATGAACTTAAG
TTATTTAGGCGTAGAACAAAATTATTCATATTTATACTGATCTTTTTCCATCCAGCAGTGGAGTTTAGTA
CTTAAGAGTTTGTGCCCTTAAACCAGACTCCCTGGATTAATGCTGTGTACCCGTGGGCAAGGTGCCTGAA
TTCTCTATACACCTATTTCCTCATCTGTAAAATGGCAATAATAGTAATAGTACCTAATGTGTAGGGTTGT
TATAAGCATTGAGTAAGATAAATAATATAAAGCACTTAGAACAGTGCCTGGAACATAAAAACACTTAATA
ATAGCTCATAGCTAACATTTCCTATTTACATTTCTTCTAGAAATAGCCAGTATTTGTTGAGTGCCTACAT
GTTAGTTCCTTTACTAGTTGCTTTACATGTATTATCTTATATTCTGTTTTAAAGTTTCTTCACAGTTACA
GATTTTCATGAAATTTTACTTTTAATAAAAGAGAAGTAAAAGTATAAAGTATTCACTTTTATGTTCACAG
TCTTTTCCTTTAGGCTCATGATGGAGTATCAGAGGCATGAGTGTGTTTAACCTAAGAGCCTTAATGGCTT
GAATCAGAAGCACTTTAGTCCTGTATCTGTTCAGTGTCAGCCTTTCATACATCATTTTAAATCCCATTTG
ACTTTAAGTAAGTCACTTAATCTCTCTACATGTCAATTTCTTCAGCTATAAAATGATGGTATTTCAATAA
ATAAATACATTAATTAAATGATATTATACTGACTAATTGGGCTGTTTTAAGGCTCAATAAGAAAATTTCT
GTGAAAGGTCTCTAGAAAATGTAGGTTCCTATACAAATAAAAGATAACATTGTGCTTATAAAAAAAA
SEQ ID NO: 12
>NM_018325.5 Homo sapiens C9orf72-SMCR8 complex subunit (C9orf72),
transcript variant 2, mRNA
GGTTGCGGTGCCTGCGCCCGCGGCGGCGGAGGCGCAGGCGGTGGCGAGTGGATATCTCCGGAGCATTTGG
ATAATGTGACAGTTGGAATGCAGTGATGTCGACTCTTTGCCCACCGCCATCTCCAGCTGTTGCCAAGACA
GAGATTGCTTTAAGTGGCAAATCACCTTTATTAGCAGCTACTTTTGCTTACTGGGACAATATTCTTGGTC
CTAGAGTAAGGCACATTTGGGCTCCAAAGACAGAACAGGTACTTCTCAGTGATGGAGAAATAACTTTTCT
TGCCAACCACACTCTAAATGGAGAAATCCTTCGAAATGCAGAGAGTGGTGCTATAGATGTAAAGTTTTTT
GTCTTGTCTGAAAAGGGAGTGATTATTGTTTCATTAATCTTTGATGGAAACTGGAATGGGGATCGCAGCA
CATATGGACTATCAATTATACTTCCACAGACAGAACTTAGTTTCTACCTCCCACTTCATAGAGTGTGTGT
TGATAGATTAACACATATAATCCGGAAAGGAAGAATATGGATGCATAAGGAAAGACAAGAAAATGTCCAG
AAGATTATCTTAGAAGGCACAGAGAGAATGGAAGATCAGGGTCAGAGTATTATTCCAATGCTTACTGGAG
AAGTGATTCCTGTAATGGAACTGCTTTCATCTATGAAATCACACAGTGTTCCTGAAGAAATAGATATAGC
TGATACAGTACTCAATGATGATGATATTGGTGACAGCTGTCATGAAGGCTTTCTTCTCAATGCCATCAGC
TCACACTTGCAAACCTGTGGCTGTTCCGTTGTAGTAGGTAGCAGTGCAGAGAAAGTAAATAAGATAGTCA
GAACATTATGCCTTTTTCTGACTCCAGCAGAGAGAAAATGCTCCAGGTTATGTGAAGCAGAATCATCATT
TAAATATGAGTCAGGGCTCTTTGTACAAGGCCTGCTAAAGGATTCAACTGGAAGCTTTGTGCTGCCTTTC
CGGCAAGTCATGTATGCTCCATATCCCACCACACACATAGATGTGGATGTCAATACTGTGAAGCAGATGC
CACCCTGTCATGAACATATTTATAATCAGCGTAGATACATGAGATCCGAGCTGACAGCCTTCTGGAGAGC
CACTTCAGAAGAAGACATGGCTCAGGATACGATCATCTACACTGACGAAAGCTTTACTCCTGATTTGAAT
ATTTTTCAAGATGTCTTACACAGAGACACTCTAGTGAAAGCCTTCCTGGATCAGGTCTTTCAGCTGAAAC
CTGGCTTATCTCTCAGAAGTACTTTCCTTGCACAGTTTCTACTTGTCCTTCACAGAAAAGCCTTGACACT
AATAAAATATATAGAAGACGATACGCAGAAGGGAAAAAAGCCCTTTAAATCTCTTCGGAACCTGAAGATA
GACCTTGATTTAACAGCAGAGGGCGATCTTAACATAATAATGGCTCTGGCTGAGAAAATTAAACCAGGCC
TACACTCTTTTATCTTTGGAAGACCTTTCTACACTAGTGTGCAAGAACGAGATGTTCTAATGACTTTTTA
AATGTGTAACTTAATAAGCCTATTCCATCACAATCATGATCGCTGGTAAAGTAGCTCAGTGGTGTGGGGA
AACGTTCCCCTGGATCATACTCCAGAATTCTGCTCTCAGCAATTGCAGTTAAGTAAGTTACACTACAGTT
CTCACAAGAGCCTGTGAGGGGATGTCAGGTGCATCATTACATTGGGTGTCTCTTTTCCTAGATTTATGCT
TTTGGGATACAGACCTATGTTTACAATATAATAAATATTATTGCTATCTTTTAAAGATATAATAATAGGA
TGTAAACTTGACCACAACTACTGTTTTTTTGAAATACATGATTCATGGTTTACATGTGTCAAGGTGAAAT
CTGAGTTGGCTTTTACAGATAGTTGACTTTCTATCTTTTGGCATTCTTTGGTGTGTAGAATTACTGTAAT
ACTTCTGCAATCAACTGAAAACTAGAGCCTTTAAATGATTTCAATTCCACAGAAAGAAAGTGAGCTTGAA
CATAGGATGAGCTTTAGAAAGAAAATTGATCAAGCAGATGTTTAATTGGAATTGATTATTAGATCCTACT
TTGTGGATTTAGTCCCTGGGATTCAGTCTGTAGAAATGTCTAATAGTTCTCTATAGTCCTTGTTCCTGGT
GAACCACAGTTAGGGTGTTTTGTTTATTTTATTGTTCTTGCTATTGTTGATATTCTATGTAGTTGAGCTC
TGTAAAAGGAAATTGTATTTTATGTTTTAGTAATTGTTGCCAACTTTTTAAATTAATTTTCATTATTTTT
GAGCCAAATTGAAATGTGCACCTCCTGTGCCTTTTTTCTCCTTAGAAAATCTAATTACTTGGAACAAGTT
CAGATTTCACTGGTCAGTCATTTTCATCTTGTTTTCTTCTTGCTAAGTCTTACCATGTACCTGCTTTGGC
AATCATTGCAACTCTGAGATTATAAAATGCCTTAGAGAATATACTAACTAATAAGATCTTTTTTTCAGAA
ACAGAAAATAGTTCCTTGAGTACTTCCTTCTTGCATTTCTGCCTATGTTTTTGAAGTTGTTGCTGTTTGC
CTGCAATAGGCTATAAGGAATAGCAGGAGAAATTTTACTGAAGTGCTGTTTTCCTAGGTGCTACTTTGGC
AGAGCTAAGTTATCTTTTGTTTTCTTAATGCGTTTGGACCATTTTGCTGGCTATAAAATAACTGATTAAT
ATAATTCTAACACAATGTTGACATTGTAGTTACACAAACACAAATAAATATTTTATTTAAAATTCTGGAA
GTAATATAAAAGGGAAAATATATTTATAAGAAAGGGATAAAGGTAATAGAGCCCTTCTGCCCCCCACCCA
CCAAATTTACACAACAAAATGACATGTTCGAATGTGAAAGGTCATAATAGCTTTCCCATCATGAATCAGA
AAGATGTGGACAGCTTGATGTTTTAGACAACCACTGAACTAGATGACTGTTGTACTGTAGCTCAGTCATT
TAAAAAATATATAAATACTACCTTGTAGTGTCCCATACTGTGTTTTTTACATGGTAGATTCTTATTTAAG
TGCTAACTGGTTATTTTCTTTGGCTGGTTTATTGTACTGTTATACAGAATGTAAGTTGTACAGTGAAATA
AGTTATTAAAGCATGTGTAAACATTGTTATATATCTTTTCTCCTAAATGGAGAATTTTGAATAAAATATA
TTTGAAATTTT
SEQ ID NO: 13
>NM_001256054.2 Homo sapiens C9orf72-SMCR8 complex subunit (C9orf72),
transcript variant 3, mRNA
ACGTAACCTACGGTGTCCCGCTAGGAAAGAGAGGTGCGTCAAACAGCGACAAGTTCCGCCCACGTAAAAG
ATGACGCTTGGTGTGTCAGCCGTCCCTGCTGCCCGGTTGCTTCTCTTTTGGGGGCGGGGTCTAGCAAGAG
CAGGTGTGGGTTTAGGAGATATCTCCGGAGCATTTGGATAATGTGACAGTTGGAATGCAGTGATGTCGAC
TCTTTGCCCACCGCCATCTCCAGCTGTTGCCAAGACAGAGATTGCTTTAAGTGGCAAATCACCTTTATTA
GCAGCTACTTTTGCTTACTGGGACAATATTCTTGGTCCTAGAGTAAGGCACATTTGGGCTCCAAAGACAG
AACAGGTACTTCTCAGTGATGGAGAAATAACTTTTCTTGCCAACCACACTCTAAATGGAGAAATCCTTCG
AAATGCAGAGAGTGGTGCTATAGATGTAAAGTTTTTTGTCTTGTCTGAAAAGGGAGTGATTATTGTTTCA
TTAATCTTTGATGGAAACTGGAATGGGGATCGCAGCACATATGGACTATCAATTATACTTCCACAGACAG
AACTTAGTTTCTACCTCCCACTTCATAGAGTGTGTGTTGATAGATTAACACATATAATCCGGAAAGGAAG
AATATGGATGCATAAGGAAAGACAAGAAAATGTCCAGAAGATTATCTTAGAAGGCACAGAGAGAATGGAA
GATCAGGGTCAGAGTATTATTCCAATGCTTACTGGAGAAGTGATTCCTGTAATGGAACTGCTTTCATCTA
TGAAATCACACAGTGTTCCTGAAGAAATAGATATAGCTGATACAGTACTCAATGATGATGATATTGGTGA
CAGCTGTCATGAAGGCTTTCTTCTCAATGCCATCAGCTCACACTTGCAAACCTGTGGCTGTTCCGTTGTA
GTAGGTAGCAGTGCAGAGAAAGTAAATAAGATAGTCAGAACATTATGCCTTTTTCTGACTCCAGCAGAGA
GAAAATGCTCCAGGTTATGTGAAGCAGAATCATCATTTAAATATGAGTCAGGGCTCTTTGTACAAGGCCT
GCTAAAGGATTCAACTGGAAGCTTTGTGCTGCCTTTCCGGCAAGTCATGTATGCTCCATATCCCACCACA
CACATAGATGTGGATGTCAATACTGTGAAGCAGATGCCACCCTGTCATGAACATATTTATAATCAGCGTA
GATACATGAGATCCGAGCTGACAGCCTTCTGGAGAGCCACTTCAGAAGAAGACATGGCTCAGGATACGAT
CATCTACACTGACGAAAGCTTTACTCCTGATTTGAATATTTTTCAAGATGTCTTACACAGAGACACTCTA
GTGAAAGCCTTCCTGGATCAGGTCTTTCAGCTGAAACCTGGCTTATCTCTCAGAAGTACTTTCCTTGCAC
AGTTTCTACTTGTCCTTCACAGAAAAGCCTTGACACTAATAAAATATATAGAAGACGATACGCAGAAGGG
AAAAAAGCCCTTTAAATCTCTTCGGAACCTGAAGATAGACCTTGATTTAACAGCAGAGGGCGATCTTAAC
ATAATAATGGCTCTGGCTGAGAAAATTAAACCAGGCCTACACTCTTTTATCTTTGGAAGACCTTTCTACA
CTAGTGTGCAAGAACGAGATGTTCTAATGACTTTTTAAATGTGTAACTTAATAAGCCTATTCCATCACAA
TCATGATCGCTGGTAAAGTAGCTCAGTGGTGTGGGGAAACGTTCCCCTGGATCATACTCCAGAATTCTGC
TCTCAGCAATTGCAGTTAAGTAAGTTACACTACAGTTCTCACAAGAGCCTGTGAGGGGATGTCAGGTGCA
TCATTACATTGGGTGTCTCTTTTCCTAGATTTATGCTTTTGGGATACAGACCTATGTTTACAATATAATA
AATATTATTGCTATCTTTTAAAGATATAATAATAGGATGTAAACTTGACCACAACTACTGTTTTTTTGAA
ATACATGATTCATGGTTTACATGTGTCAAGGTGAAATCTGAGTTGGCTTTTACAGATAGTTGACTTTCTA
TCTTTTGGCATTCTTTGGTGTGTAGAATTACTGTAATACTTCTGCAATCAACTGAAAACTAGAGCCTTTA
AATGATTTCAATTCCACAGAAAGAAAGTGAGCTTGAACATAGGATGAGCTTTAGAAAGAAAATTGATCAA
GCAGATGTTTAATTGGAATTGATTATTAGATCCTACTTTGTGGATTTAGTCCCTGGGATTCAGTCTGTAG
AAATGTCTAATAGTTCTCTATAGTCCTTGTTCCTGGTGAACCACAGTTAGGGTGTTTTGTTTATTTTATT
GTTCTTGCTATTGTTGATATTCTATGTAGTTGAGCTCTGTAAAAGGAAATTGTATTTTATGTTTTAGTAA
TTGTTGCCAACTTTTTAAATTAATTTTCATTATTTTTGAGCCAAATTGAAATGTGCACCTCCTGTGCCTT
TTTTCTCCTTAGAAAATCTAATTACTTGGAACAAGTTCAGATTTCACTGGTCAGTCATTTTCATCTTGTT
TTCTTCTTGCTAAGTCTTACCATGTACCTGCTTTGGCAATCATTGCAACTCTGAGATTATAAAATGCCTT
AGAGAATATACTAACTAATAAGATCTTTTTTTCAGAAACAGAAAATAGTTCCTTGAGTACTTCCTTCTTG
CATTTCTGCCTATGTTTTTGAAGTTGTTGCTGTTTGCCTGCAATAGGCTATAAGGAATAGCAGGAGAAAT
TTTACTGAAGTGCTGTTTTCCTAGGTGCTACTTTGGCAGAGCTAAGTTATCTTTTGTTTTCTTAATGCGT
TTGGACCATTTTGCTGGCTATAAAATAACTGATTAATATAATTCTAACACAATGTTGACATTGTAGTTAC
ACAAACACAAATAAATATTTTATTTAAAATTCTGGAAGTAATATAAAAGGGAAAATATATTTATAAGAAA
GGGATAAAGGTAATAGAGCCCTTCTGCCCCCCACCCACCAAATTTACACAACAAAATGACATGTTCGAAT
GTGAAAGGTCATAATAGCTTTCCCATCATGAATCAGAAAGATGTGGACAGCTTGATGTTTTAGACAACCA
CTGAACTAGATGACTGTTGTACTGTAGCTCAGTCATTTAAAAAATATATAAATACTACCTTGTAGTGTCC
CATACTGTGTTTTTTACATGGTAGATTCTTATTTAAGTGCTAACTGGTTATTTTCTTTGGCTGGTTTATT
GTACTGTTATACAGAATGTAAGTTGTACAGTGAAATAAGTTATTAAAGCATGTGTAAACATTGTTATATA
TCTTTTCTCCTAAATGGAGAATTTTGAATAAAATATATTTGAAATTTTAAAAAAAAAAAAAAAAAA

The application's sequence listing, which the Patent Office published only in electronic form, follows.

SEQUENCE LISTING (2527 sequences)

SEQ ID NO: 1 - DNA, 483 bp, Homo sapiens
ctttttgtccgacatcttgacgaggctgcggtgtctgctgctattctccgagcttcgcaatgccgcctaaggacgacaagaagaagaaggacgctggaaagtcggccaagaaagacaaagacccagtgaacaaatccgggggcaaggccaaaaagaagaagtggtccaaaggcaaagttcgggacaagctcaataacttagtcttgtttgacaaagctacctatgataaactctgtaaggaagttcccaactataaacttataaccccagctgtggtctctgagagactgaagattcgaggctccctggccagggcagcccttcaggagctccttagtaaaggacttatcaaactggtttcaaagcacagagctcaagtaatttacaccagaaataccaagggtggagatgctccagctgctggtgaagatgcatgaataggtccaaccagctgtacatttggaaaaataaaactttattaaa

SEQ ID NO: 2 - DNA, 483 bp, Homo sapiens
tttaataaagttttatttttccaaatgtacagctggttggacctattcatgcatcttcaccagcagctggagcatctccacccttggtatttctggtgtaaattacttgagctctgtgctttgaaaccagtttgataagtcctttactaaggagctcctgaagggctgccctggccagggagcctcgaatcttcagtctctcagagaccacagctggggttataagtttatagttgggaacttccttacagagtttatcataggtagctttgtcaaacaagactaagttattgagcttgtcccgaactttgcctttggaccacttcttctttttggccttgcccccggatttgttcactgggtctttgtctttcttggccgactttccagcgtccttcttcttcttgtcgtccttaggcggcattgcgaagctcggagaatagcagcagacaccgcagcctcgtcaagatgtcggacaaaaag

SEQ ID NO: 3 - DNA, 701 bp, Mus musculus
agcgaggctgctgtggtctacacgactctctgagcttcgccatgcctcccaaagacgacaagaagaagaaagatgccggaaagtcggccaaaaaggataaagacccagtaaataaatctggtggcaaggccaagaagaagaagtggtccaaaggcaaagttcgggacaagttgaacaatcttgtcctgttcgacaaagcgacatacgacaagctctgtaaggaggttccgaactataagcttattactccagccgtggtctctgagagactgaagattcgcggttccttggccagggcagcccttcaggagctccttagtaaaggacttatcaagctggtttcaaagcacagagcccaagtaatttacaccagaaacacaaagggtggggacgctccagctgctggcgaagatgcatgaacaggttcaatcagctgtacatttggaaaaataaaactttattgaatcaaatgaatgggtgcatctgtttcctaaggcagccggggaggatttggtcttaggaataatagctggaattggtttgttggccatgaagtcagatgcaattgcgcctgggaaccttcagcttttccctttacgtggttgcttgcttcttgttgcagcttcggttttgaattgatgcctgaaagaaaataaaaacttagcaagactaatggtaaatctaaaaaaaaaaaaaaaaaa

SEQ ID NO: 4 - DNA, 701 bp, Mus musculus
ttttttttttttttttttagatttaccattagtcttgctaagtttttattttctttcaggcatcaattcaaaaccgaagctgcaacaagaagcaagcaaccacgtaaagggaaaagctgaaggttcccaggcgcaattgcatctgacttcatggccaacaaaccaattccagctattattcctaagaccaaatcctccccggctgccttaggaaacagatgcacccattcatttgattcaataaagttttatttttccaaatgtacagctgattgaacctgttcatgcatcttcgccagcagctggagcgtccccaccctttgtgtttctggtgtaaattacttgggctctgtgctttgaaaccagcttgataagtcctttactaaggagctcctgaagggctgccctggccaaggaaccgcgaatcttcagtctctcagagaccacggctggagtaataagcttatagttcggaacctccttacagagcttgtcgtatgtcgctttgtcgaacaggacaagattgttcaacttgtcccgaactttgcctttggaccacttcttcttcttggccttgccaccagatttatttactgggtctttatcctttttggccgactttccggcatctttcttcttcttgtcgtctttgggaggcatggcgaagctcagagagtcgtgtagaccacagcagcctcgct

SEQ ID NO: 5 - DNA, 466 bp, Rattus norvegicus
tgtggctgcagtggtccacactactctctgagtttcgccatgccgcccaaagacgacaagaagaagaaggatgccggaaagtcggccaaaaaagacaaggacccagtaaataaatctggtggcaaggccaaaaagaagaagtggtccaaaggcaaagttcgggacaagctgaacaatctcgtcctgtttgacaaagctacttacgacaaactttgtaaggaagttcccaactataagcttattactccagctgtggtctccgagagactgaagattcgaggttccttggccagggcagcccttcaggagctacttagtaaaggacttatcaagctggtttcaaagcacagagcccaagtaatttacaccagaaacacaaagggtggagatgccccagctgctggtgaagatgcataaacagattgaatcagctgtacatttgggaaaataaaactttattgaatca

SEQ ID NO: 6 - DNA, 466 bp, Rattus norvegicus
tgattcaataaagttttattttcccaaatgtacagctgattcaatctgtttatgcatcttcaccagcagctggggcatctccaccctttgtgtttctggtgtaaattacttgggctctgtgctttgaaaccagcttgataagtcctttactaagtagctcctgaagggctgccctggccaaggaacctcgaatcttcagtctctcggagaccacagctggagtaataagcttatagttgggaacttccttacaaagtttgtcgtaagtagctttgtcaaacaggacgagattgttcagcttgtcccgaactttgcctttggaccacttcttctttttggccttgccaccagatttatttactgggtccttgtcttttttggccgactttccggcatccttcttcttcttgtcgtctttgggcggcatggcgaaactcagagagtagtgtggaccactgcagccaca

SEQ ID NO: 7 - DNA, 813 bp, Macaca mulatta
gcacctgcggcgcctgcgcattgggagcgacacgctcgggcataagtagtgccggaaagttagttgccgagacctggtggattgttttccgtttatcagtgccggaaaacagtactacagtactgcgtcacaactagcccggactccgacaacctggcgcggtatttaggcggtgcggcttgggaactagaattcacttcctgtcttcctcttgaggctagagggcgagcacttcgccgtgggacttcctccgcctggctccgcctcttgccccggaagtacttacagcggacggaggtttctgggcccgtttctgagcagcgcttcctttttgtccgacatcttagcaagcctgcggtgtctgctgctgctccccgagcttcgcaatgccgcccaaggacgacaagaagaagaaggacgccggaaagtcggccaagaaagacaaagacccagtgaacaaatctgggggcaaggccaaaaagaagaagtggtccaaaggcaaagttcgggacaagctcaataacttagtcttgtttgacaaagctacctacgacaaactctgtaaggaagttcccaactataaacttataaccccagctgtagtctctgagagactgaagattcgaggctccctggccagggcagcccttcaggagctccttagtaaaggacttatcaaactggtttcaaagcacagagctcaagtaatttacaccagaaataccaagggcggagatgctccagctgctggtgaagatgcatgaataggtccaaccaattgtacatttggaaaaataaaactattaaatcaaa

SEQ ID NO: 8 - DNA, 813 bp, Macaca mulatta
tttgatttaatagttttatttttccaaatgtacaattggttggacctattcatgcatcttcaccagcagctggagcatctccgcccttggtatttctggtgtaaattacttgagctctgtgctttgaaaccagtttgataagtcctttactaaggagctcctgaagggctgccctggccagggagcctcgaatcttcagtctctcagagactacagctggggttataagtttatagttgggaacttccttacagagtttgtcgtaggtagctttgtcaaacaagactaagttattgagcttgtcccgaactttgcctttggaccacttcttctttttggccttgcccccagatttgttcactgggtctttgtctttcttggccgactttccggcgtccttcttcttcttgtcgtccttgggcggcattgcgaagctcggggagcagcagcagacaccgcaggcttgctaagatgtcggacaaaaaggaagcgctgctcagaaacgggcccagaaacctccgtccgctgtaagtacttccggggcaagaggcggagccaggcggaggaagtcccacggcgaagtgctcgccctctagcctcaagaggaagacaggaagtgaattctagttcccaagccgcaccgcctaaataccgcgccaggttgtcggagtccgggctagttgtgacgcagtactgtagtactgttttccggcactgataaacggaaaacaatccaccaggtctcggcaactaactttccggcactacttatgcccgagcgtgtcgctcccaatgcgcaggcgccgcaggtgc

SEQ ID NO: 9 - DNA, 501 bp, Macaca fascicularis
ctttttgtccgacatcttagcaagccagcggtgtctgctgctgctccccgagcttcgcaatgccgcccaaggacgacaagaagaaggaggacgccggaaagtcggccaagaaagacaaagacccagtgaacaaatctgggggcaaggccaaaaagaagaagtggtccaaaggcaaagttcgggacaagctcaataacttagtcttgtttgacaaagctacctacgacaaactctgtaaggaagttcccaactataaacttataaccccagctgtagtctctgagagactgaagattcgaggctccctggccagggcagcccttcaggagctccttagtaaaggacttatcaaactggtttcaaagcacagagctcaagtaatttacaccagaaataccaagggcggagatgctccagctgctggtgaagatgcatgaataggtccaaccaattgtacatttggaaaaataaaactttattaaatcaaaaaaaaaaaaaaaa

SEQ ID NO: 10 - DNA, 501 bp, Macaca fascicularis
ttttttttttttttttgatttaataaagttttatttttccaaatgtacaattggttggacctattcatgcatcttcaccagcagctggagcatctccgcccttggtatttctggtgtaaattacttgagctctgtgctttgaaaccagtttgataagtcctttactaaggagctcctgaagggctgccctggccagggagcctcgaatcttcagtctctcagagactacagctggggttataagtttatagttgggaacttccttacagagtttgtcgtaggtagctttgtcaaacaagactaagttattgagcttgtcccgaactttgcctttggaccacttcttctttttggccttgcccccagatttgttcactgggtctttgtctttcttggccgactttccggcgtcctccttcttcttgtcgtccttgggcggcattgcgaagctcggggagcagcagcagacaccgctggcttgctaagatgtcggacaaaaag

SEQ ID NO: 11 - DNA, 1957 bp, Homo sapiens
acgtaacctacggtgtcccgctaggaaagagaggtgcgtcaaacagcgacaagttccgcccacgtaaaagatgacgcttgatatctccggagcatttggataatgtgacagttggaatgcagtgatgtcgactctttgcccaccgccatctccagctgttgccaagacagagattgctttaagtggcaaatcacctttattagcagctacttttgcttactgggacaatattcttggtcctagagtaaggcacatttgggctccaaagacagaacaggtacttctcagtgatggagaaataacttttcttgccaaccacactctaaatggagaaatccttcgaaatgcagagagtggtgctatagatgtaaagttttttgtcttgtctgaaaagggagtgattattgtttcattaatctttgatggaaactggaatggggatcgcagcacatatggactatcaattatacttccacagacagaacttagtttctacctcccacttcatagagtgtgtgttgatagattaacacatataatccggaaaggaagaatatggatgcataaggaaagacaagaaaatgtccagaagattatcttagaaggcacagagagaatggaagatcagggtcagagtattattccaatgcttactggagaagtgattcctgtaatggaactgctttcatctatgaaatcacacagtgttcctgaagaaatagatatagctgatacagtactcaatgatgatgatattggtgacagctgtcatgaaggctttcttctcaagtaagaatttttcttttcataaaagctggatgaagcagataccatcttatgctcacctatgacaagatttggaagaaagaaaataacagactgtctacttagattgttctagggacattacgtatttgaactgttgcttaaatttgtgttatttttcactcattatatttctatatatatttggtgttattccatttgctatttaaagaaaccgagtttccatcccagacaagaaatcatggccccttgcttgattctggtttcttgttttacttctcattaaagctaacagaatcctttcatattaagttgtactgtagatgaacttaagttatttaggcgtagaacaaaattattcatatttatactgatctttttccatccagcagtggagtttagtacttaagagtttgtgcccttaaaccagactccctggattaatgctgtgtacccgtgggcaaggtgcctgaattctctatacacctatttcctcatctgtaaaatggcaataatagtaatagtacctaatgtgtagggttgttataagcattgagtaagataaataatataaagcacttagaacagtgcctggaacataaaaacacttaataatagctcatagctaacatttcctatttacatttcttctagaaatagccagtatttgttgagtgcctacatgttagttcctttactagttgctttacatgtattatcttatattctgttttaaagtttcttcacagttacagattttcatgaaattttacttttaataaaagagaagtaaaagtataaagtattcacttttatgttcacagtcttttcctttaggctcatgatggagtatcagaggcatgagtgtgtttaacctaagagccttaatggcttgaatcagaagcactttagtcctgtatctgttcagtgtcagcctttcatacatcattttaaatcccatttgactttaagtaagtcacttaatctctctacatgtcaatttcttcagctataaaatgatggtatttcaataaataaatacattaattaaatgatattatactgactaattgggctgttttaaggctcaataagaaaatttctgtgaaaggtctctagaaaatgtaggttcctatacaaataaaagataacattgtgcttataaaaaaaa

SEQ ID NO: 12 - DNA, 3231 bp, Homo sapiens
ggttgcggtgcctgcgcccgcggcggcggaggcgcaggcggtggcgagtggatatctccggagcatttggataatgtgacagttggaatgcagtgatgtcgactctttgcccaccgccatctccagctgttgccaagacagagattgctttaagtggcaaatcacctttattagcagctacttttgcttactgggacaatattcttggtcctagagtaaggcacatttgggctccaaagacagaacaggtacttctcagtgatggagaaataacttttcttgccaaccacactctaaatggagaaatccttcgaaatgcagagagtggtgctatagatgtaaagttttttgtcttgtctgaaaagggagtgattattgtttcattaatctttgatggaaactggaatggggatcgcagcacatatggactatcaattatacttccacagacagaacttagtttctacctcccacttcatagagtgtgtgttgatagattaacacatataatccggaaaggaagaatatggatgcataaggaaagacaagaaaatgtccagaagattatcttagaaggcacagagagaatggaagatcagggtcagagtattattccaatgcttactggagaagtgattcctgtaatggaactgctttcatctatgaaatcacacagtgttcctgaagaaatagatatagctgatacagtactcaatgatgatgatattggtgacagctgtcatgaaggctttcttctcaatgccatcagctcacacttgcaaacctgtggctgttccgttgtagtaggtagcagtgcagagaaagtaaataagatagtcagaacattatgcctttttctgactccagcagagagaaaatgctccaggttatgtgaagcagaatcatcatttaaatatgagtcagggctctttgtacaaggcctgctaaaggattcaactggaagctttgtgctgcctttccggcaagtcatgtatgctccatatcccaccacacacatagatgtggatgtcaatactgtgaagcagatgccaccctgtcatgaacatatttataatcagcgtagatacatgagatccgagctgacagccttctggagagccacttcagaagaagacatggctcaggatacgatcatctacactgacgaaagctttactcctgatttgaatatttttcaagatgtcttacacagagacactctagtgaaagccttcctggatcaggtctttcagctgaaacctggcttatctctcagaagtactttccttgcacagtttctacttgtccttcacagaaaagccttgacactaataaaatatatagaagacgatacgcagaagggaaaaaagccctttaaatctcttcggaacctgaagatagaccttgatttaacagcagagggcgatcttaacataataatggctctggctgagaaaattaaaccaggcctacactcttttatctttggaagacctttctacactagtgtgcaagaacgagatgttctaatgactttttaaatgtgtaacttaataagcctattccatcacaatcatgatcgctggtaaagtagctcagtggtgtggggaaacgttcccctggatcatactccagaattctgctctcagcaattgcagttaagtaagttacactacagttctcacaagagcctgtgaggggatgtcaggtgcatcattacattgggtgtctcttttcctagatttatgcttttgggatacagacctatgtttacaatataataaatattattgctatcttttaaagatataataataggatgtaaacttgaccacaactactgtttttttgaaatacatgattcatggtttacatgtgtcaaggtgaaatctgagttggcttttacagatagttgactttctatcttttggcattctttggtgtgtagaattactgtaatacttctgcaatcaactgaaaactagagcctttaaatgatttcaattccacagaaagaaagtgagcttgaacataggatgagctttagaaagaaaattgatcaagcagatgtttaattggaattgattattagatcctactttgtggatttagtccctgggattcagtctgtagaaatgtctaatagttctctatagtccttgttcctggtgaaccacagttagggtgttttgtttattttattgttcttgctattgttgatattctatgtagttgagctctgtaaaaggaaattgtattttatgttttagtaattgttgccaactttttaaattaattttcattatttttgagccaaattgaaatgtgcacctcctgtgccttttttctccttagaaaatctaattacttggaacaagttcagatttcactggtcagtcattttcatcttgttttcttcttgctaagtcttaccatgtacctgctttggcaatcattgcaactctgagattataaaatgccttagagaatatactaactaataagatctttttttcagaaacagaaaatagttccttgagtacttccttcttgcatttctgcctatgtttttgaagttgttgctgtttgcctgcaataggctataaggaatagcaggagaaattttactgaagtgctgttttcctaggtgctactttggcagagctaagttatcttttgttttcttaatgcgtttggaccattttgctggctataaaataactgattaatataattctaacacaatgttgacattgtagttacacaaacacaaataaatattttatttaaaattctggaagtaatataaaagggaaaatatatttataagaaagggataaaggtaatagagcccttctgccccccacccaccaaatttacacaacaaaatgacatgttcgaatgtgaaaggtcataatagctttcccatcatgaatcagaaagatgtggacagcttgatgttttagacaaccactgaactagatgactgttgtactgtagctcagtcatttaaaaaatatataaatactaccttgtagtgtcccatactgtgttttttacatggtagattcttatttaagtgctaactggttattttctttggctggtttattgtactgttatacagaatgtaagttgtacagtgaaataagttattaaagcatgtgtaaacattgttatatatcttttctcctaaatggagaattttgaataaaatatatttgaaatttt

SEQ ID NO: 13 - DNA, 3356 bp, Homo sapiens
acgtaacctacggtgtcccgctaggaaagagaggtgcgtcaaacagcgacaagttccgcccacgtaaaagatgacgcttggtgtgtcagccgtccctgctgcccggttgcttctcttttgggggcggggtctagcaagagcaggtgtgggtttaggagatatctccggagcatttggataatgtgacagttggaatgcagtgatgtcgactctttgcccaccgccatctccagctgttgccaagacagagattgctttaagtggcaaatcacctttattagcagctacttttgcttactgggacaatattcttggtcctagagtaaggcacatttgggctccaaagacagaacaggtacttctcagtgatggagaaataacttttcttgccaaccacactctaaatggagaaatccttcgaaatgcagagagtggtgctatagatgtaaagttttttgtcttgtctgaaaagggagtgattattgtttcattaatctttgatggaaactggaatggggatcgcagcacatatggactatcaattatacttccacagacagaacttagtttctacctcccacttcatagagtgtgtgttgatagattaacacatataatccggaaaggaagaatatggatgcataaggaaagacaagaaaatgtccagaagattatcttagaaggcacagagagaatggaagatcagggtcagagtattattccaatgcttactggagaagtgattcctgtaatggaactgctttcatctatgaaatcacacagtgttcctgaagaaatagatatagctgatacagtactcaatgatgatgatattggtgacagctgtcatgaaggctttcttctcaatgccatcagctcacacttgcaaacctgtggctgttccgttgtagtaggtagcagtgcagagaaagtaaataagatagtcagaacattatgcctttttctgactccagcagagagaaaatgctccaggttatgtgaagcagaatcatcatttaaatatgagtcagggctctttgtacaaggcctgctaaaggattcaactggaagctttgtgctgcctttccggcaagtcatgtatgctccatatcccaccacacacatagatgtggatgtcaatactgtgaagcagatgccaccctgtcatgaacatatttataatcagcgtagatacatgagatccgagctgacagccttctggagagccacttcagaagaagacatggctcaggatacgatcatctacactgacgaaagctttactcctgatttgaatatttttcaagatgtcttacacagagacactctagtgaaagccttcctggatcaggtctttcagctgaaacctggcttatctctcagaagtactttccttgcacagtttctacttgtccttcacagaaaagccttgacactaataaaatatatagaagacgatacgcagaagggaaaaaagccctttaaatctcttcggaacctgaagatagaccttgatttaacagcagagggcgatcttaacataataatggctctggctgagaaaattaaaccaggcctacactcttttatctttggaagacctttctacactagtgtgcaagaacgagatgttctaatgactttttaaatgtgtaacttaataagcctattccatcacaatcatgatcgctggtaaagtagctcagtggtgtggggaaacgttcccctggatcatactccagaattctgctctcagcaattgcagttaagtaagttacactacagttctcacaagagcctgtgaggggatgtcaggtgcatcattacattgggtgtctcttttcctagatttatgcttttgggatacagacctatgtttacaatataataaatattattgctatcttttaaagatataataataggatgtaaacttgaccacaactactgtttttttgaaatacatgattcatggtttacatgtgtcaaggtgaaatctgagttggcttttacagatagttgactttctatcttttggcattctttggtgtgtagaattactgtaatacttctgcaatcaactgaaaactagagcctttaaatgatttcaattccacagaaagaaagtgagcttgaacataggatgagctttagaaagaaaattgatcaagcagatgtttaattggaattgattattagatcctactttgtggatttagtccctgggattcagtctgtagaaatgtctaatagttctctatagtccttgttcctggtgaaccacagttagggtgttttgtttattttattgttcttgctattgttgatattctatgtagttgagctctgtaaaaggaaattgtattttatgttttagtaattgttgccaactttttaaattaattttcattatttttgagccaaattgaaatgtgcacctcctgtgccttttttctccttagaaaatctaattacttggaacaagttcagatttcactggtcagtcattttcatcttgttttcttcttgctaagtcttaccatgtacctgctttggcaatcattgcaactctgagattataaaatgccttagagaatatactaactaataagatctttttttcagaaacagaaaatagttccttgagtacttccttcttgcatttctgcctatgtttttgaagttgttgctgtttgcctgcaataggctataaggaatagcaggagaaattttactgaagtgctgttttcctaggtgctactttggcagagctaagttatcttttgttttcttaatgcgtttggaccattttgctggctataaaataactgattaatataattctaacacaatgttgacattgtagttacacaaacacaaataaatattttatttaaaattctggaagtaatataaaagggaaaatatatttataagaaagggataaaggtaatagagcccttctgccccccacccaccaaatttacacaacaaaatgacatgttcgaatgtgaaaggtcataatagctttcccatcatgaatcagaaagatgtggacagcttgatgttttagacaaccactgaactagatgactgttgtactgtagctcagtcatttaaaaaatatataaatactaccttgtagtgtcccatactgtgttttttacatggtagattcttatttaagtgctaactggttattttctttggctggtttattgtactgttatacagaatgtaagttgtacagtgaaataagttattaaagcatgtgtaaacattgttatatatcttttctcctaaatggagaattttgaataaaatatatttgaaattttaaaaaaaaaaaaaaaaaa

SEQ ID NO: 14 - DNA, 132 bp, Homo sapiens
  misc_feature (1)..(132): /note="This sequence may encompass 2-22 'ggggcc' repeating units"
ggggccggggccggggccggggccggggccggggccggggccggggccggggccggggccggggccggggccggggccggggccggggccggggccggggccggggccggggccggggccggggccggggcc

SEQ ID NO: 15 - DNA, 9600 bp, Homo sapiens
  misc_feature (1)..(9600): /note="This sequence may encompass 700-1600 'ggggcc' repeating units"
ggggccggggccggggccggggccggggccggggccggggccggggccggggccggggccggggccggggccggggccggggccggggccggggccggggccggggccggggccggggccggggccggggccggggccggggccggggccggggccggggccggggccggggccggggccggggccggggccggggccggggccggggccggggccggggccggggccggggccggggccggggccggggccggggccggggccggggccggggccggggccggggccggggccggggccggggccggggccggggccggggccggggccggggccggggccggggccggggccggggccggggccggggccggggccggggccggggccggggccggggccggggccggggccggggccggggccggggccggggccggggccggggccggggccggggccggggccggggccggggccggggccggggccggggccggggccggggccggggccggggccggggccggggccggggccggggccggggccggggccggggccggggccggggccggggccggggccggggccggggccggggccggggccggggccggggccggggccggggccggggccggggccggggccggggccggggccggggccggggccggggccggggccggggccggggccggggccggggccggggccggggccggggccggggccggggccggggccggggccggggccggggccggggccggggccggggccggggccggggccggggccggggccggggccggggccggggccggggccggggccggggccggggccggggccggggccggggccggggccggggccggggccggggccggggccggggccggggccggggccggggccggggccggggccggggccggggccggggccggggccggggccggggccggggccggggccggggccggggccggggccggggccggggccggggccggggccggggccggggccggggccggggccggggccggggccggggccggggccggggccggggccggggccggggccggggccggggccggggccggggccggggccggggccggggccggggccggggccggggccggggccggggccggggccggggccggggccggggccggggccggggccggggccggggccggggccggggccggggccggggccggggccggggccggggccggggccggggccggggccggggccggggccggggccggggccggggccggggccggggccggggccggggccggggccggggccggggccggggccggggccggggccggggccggggccggggccggggccggggccggggccggggccggggccggggccggggccggggccggggccggggccggggccggggccggggccggggccggggccggggccggggccggggccggggccggggccggggccggggccggggccggggccggggccggggccggggccggggccggggccggggccggggccggggccggggccggggccggggccggggccggggccggggccggggccggggccggggccggggccggggccggggccggggccggggccggggccggggccggggccggggccggggccggggccggggccggggccggggccggggccggggccggggccggggccggggccggggccggggccggggccggggccggggccggggccggggccggggccggggccggggccggggccggggccggggccggggccggggccggggccggggccggggccggggccggggccggggccggggccggggccggggccggggccggggccggggccggggccggggccggggccggggccggggccggggccggggccggggccggggccggggccggggccggggccggggccggggccggggccggggccggggccggggccggggccggggccggggccggggccggggccggggccggggccggggccggggccggggccggggccggggccggggccggggccggggccggggccggggccggggccggggccggggccggggccggggccggggccggggccggggccggggccggggccggggccggggccggggccggggccggggccggggccggggccggggccggggccggggccggggccggggccggggccggggccggggccggggccggggccggggccggggccggggccggggccggggccggggccggggccggggccggggccggggccggggccggggccggggccggggccggggccggggccggggccggggccggggccggggccggggccggggccggggccggggccggggccggggccggggccggggccggggccggggccggggccggggccggggccggggccggggccggggccggggccggggccggggccggggccggggccggggccggggccggggccggggccggggccggggccggggccggggccggggccggggccggggccggggccggggccggggccggggccggggccggggccggggccggggccggggccggggccggggccggggccggggccggggccggggccggggccggggccggggccggggccggggccggggccggggccggggccggggccggggccggggccggggccggggccggggccggggccggggccggggccggggccggggccggggccggggccggggccggggccggggccggggccggggccggggccggggccggggccggggccggggccggggccggggccggggccggggccggggccggggccggggccggggccggggccggggccggggccggggccggggccggggccggggccggggccggggccggggccggggccggggccggggccggggccggggccggggccggggccggggccggggccggggccggggccggggccggggccggggccggggccggggccggggccggggccggggccggggccggggccggggccggggccggggccggggccggggccggggccggggccggggccggggccggggccggggccggggccggggccggggccggggccggggccggggccggggccggggccggggccggggccggggccggggccggggccggggccggggccggggccggggccggggccggggccggggccggggccggggccggggccggggccggggccggggccggggccggggccggggccggggccggggccggggccggggccggggccggggccggggccggggccggggccggggccggggccggggccggggccggggccggggccggggccggggccggggccggggccggggccggggccggggccggggccggggccggggccggggccggggccggggccggggccggggccggggccggggccggggccggggccggggccggggccggggccggggccggggccggggccggggccggggccggggccggggccggggccggggccggggccggggccggggccggggccggggccggggccggggccggggccggggccggggccggggccggggccggggccggggccggggccggggccggggccggggccggggccggggccggggccggggccggggccggggccggggccggggccggggccggggccggggccggggccggggccggggccggggccggggccggggccggggccggggccggggccggggccggggccggggccggggccggggccggggccggggccggggccggggccggggccggggccggggccggggccggggccggggccggggccggggccggggccggggccggggccggggccggggccggggccggggccggggccggggccggggccggggccggggccggggccggggccggggccggggccggggccggggccggggccggggccggggccggggccggggccggggccggggccggggccggggccggggccggggccggggccggggccggggccggggccggggccggggccggggccggggccggggccggggccggggccggggccggggccggggccggggccggggccggggccggggccggggccggggccggggccggggccggggccggggccggggccggggccggggccggggccggggccggggccggggccggggccggggccggggccggggccggggccggggccggggccggggccggggccggggccggggccggggccggggccggggccggggccggggccggggccggggccggggccggggccggggccggggccggggccggggccggggccggggccggggccggggccggggccggggccggggccggggccggggccggggccggggccggggccggggccggggccggggccggggccggggccggggccggggccggggccggggccggggccggggccggggccggggccggggccggggccggggccggggccggggccggggccggggccggggccggggccggggccggggccggggccggggccggggccggggccggggccggggccggggccggggccggggccggggccggggccggggccggggccggggccggggccggggccggggccggggccggggccggggccggggccggggccggggccggggccggggccggggccggggccggggccggggccggggccggggccggggccggggccggggccggggccggggccggggccggggccggggccggggccggggccggggccggggccggggccggggccggggccggggccggggccggggccggggccggggccggggccggggccggggccggggccggggccggggccggggccggggccggggccggggccggggccggggccggggccggggccggggccggggccggggccggggccggggccggggccggggccggggccggggccggggccggggccggggccggggccggggccggggccggggccggggccggggccggggccggggccggggccggggccggggccggggccggggccggggccggggccggggccggggccggggccggggccggggccggggccggggccggggccggggccggggccggggccggggccggggccggggccggggccggggccggggccggggccggggccggggccggggccggggccggggccggggccggggccggggccggggccggggccggggccggggccggggccggggccggggccggggccggggccggggccggggccggggccggggccggggccggggccggggccggggccggggccggggccggggccggggccggggccggggccggggccggggccggggccggggccggggccggggccggggccggggccggggccggggccggggccggggccggggccggggccggggccggggccggggccggggccggggccggggccggggccggggccggggccggggccggggccggggccggggccggggccggggccggggccggggccggggccggggccggggccggggccggggccggggccggggccggggccggggccggggccggggccggggccggggccggggccggggccggggccggggccggggccggggccggggccggggccggggccggggccggggccggggccggggccggggccggggccggggccggggccggggccggggccggggccggggccggggccggggccggggccggggccggggccggggccggggccggggccggggccggggccggggccggggccggggccggggccggggccggggccggggccggggccggggccggggccggggccggggccggggccggggccggggccggggccggggccggggccggggccggggccggggccggggccggggccggggccggggccggggccggggccggggccggggccggggccggggccggggccggggccggggccggggccggggccggggccggggccggggccggggccggggccggggccggggccggggccggggccggggccggggccggggccggggccggggccggggccggggccggggccggggccggggccggggccggggccggggccggggccggggccggggccggggccggggccggggccggggccggggccggggccggggccggggccggggccggggccggggccggggccggggccggggccggggccggggccggggccggggccggggccggggccggggccggggccggggccggggccggggccggggccggggccggggccggggccggggccggggccggggccggggccggggccggggccggggccggggccggggccggggccggggccggggccggggccggggccggggccggggccggggccggggccggggccggggccggggccggggccggggccggggccggggccggggccggggccggggccggggccggggccggggccggggccggggccggggccggggccggggccggggccggggccggggccggggccggggccggggccggggccggggccggggccggggccggggccggggccggggccggggccggggccggggccggggccggggccggggccggggccggggccggggccggggccggggccggggccggggccggggccggggccggggccggggccggggccggggccggggccggggccggggccggggccggggccggggccggggccggggccggggccggggccggggccggggccggggccggggccggggccggggccggggccggggccggggccggggccggggccggggccggggccggggccggggccggggccggggccggggccggggccggggccggggccggggccggggccggggccggggccggggccggggccggggccggggccggggccggggccggggccggggccggggccggggccggggccggggccggggccggggccggggccggggccggggccggggccggggccggggccggggccggggccggggccggggccggggccggggccggggccggggccggggccggggccggggccggggccggggccggggccggggccggggccggggccggggccggggccggggccggggccggggccggggccggggccggggccggggccggggccggggccggggccggggccggggccggggccggggccggggccggggccggggccggggccggggccggggccggggccggggccggggccggggccggggccggggccggggccggggccggggccggggccggggccggggccggggccggggccggggccggggccggggccggggccggggccggggccggggccggggccggggccggggccggggccggggccggggccggggccggggccggggccggggccggggccggggccggggccggggccggggccggggccggggccggggccggggccggggccggggccggggccggggccggggccggggccggggccggggccggggccggggccggggccggggccggggccggggccggggccggggccggggccggggccggggccggggccggggccggggccggggccggggccggggccggggccggggccggggccggggccggggccggggccggggccggggccggggccggggccggggccggggccggggccggggccggggccggggccggggccggggccggggccggggccggggccggggccggggccggggccggggccggggccggggccggggccggggccggggccggggccggggccggggccggggccggggccggggccggggccggggccggggccggggccggggccggggccggggccggggccggggccggggccggggccggggccggggccggggccggggccggggccggggccggggccggggccggggccggggccggggccggggccggggccggggccggggccggggccggggccggggccggggccggggccggggccggggccggggccggggccggggccggggccggggccggggccggggccggggccggggccggggccggggccggggccggggccggggccggggccggggccggggccggggccggggccggggccggggccggggccggggccggggccggggccggggccggggccggggccggggccggggccggggccggggccggggccggggccggggccggggccggggccggggccggggccggggccggggccggggccggggccggggccggggccggggccggggccggggccggggccggggccggggccggggccggggccggggccggggccggggccggggccggggccggggccggggccggggccggggccggggccggggccggggccggggccggggccggggccggggccggggccggggccggggccggggccggggccggggccggggccggggccggggccggggccggggccggggccggggccggggccggggccggggccggggccggggccggggccggggccggggccggggccggggccggggccggggccggggccggggccggggccggggccggggccggggccggggccggggccggggccggggccggggccggggccggggccggggccggggccggggccggggccggggccggggccggggccggggccggggccggggccggggccggggccggggccggggccggggccggggccggggccggggccggggccggggccggggccggggccggggccggggccggggccggggccggggccggggccggggccggggccggggccggggccggggccggggccggggccggggccggggccggggccggggccggggccggggccggggccggggccggggccggggccggggccggggccggggccggggccggggccggggccggggccggggccggggccggggccggggccggggccggggccggggccggggccggggccggggccggggccggggccggggccggggccggggccggggccggggccggggccggggccggggccggggccggggccggggccggggccggggccggggccggggccggggccggggccggggccggggccggggccggggccggggccggggccggggccggggccggggccggggccggggccggggccggggccggggccggggccggggccggggccggggccggggccggggccggggccggggccggggccggggccggggccggggccggggccggggccggggccggggccggggccggggcc

SEQ ID NO: 16 - DNA, 12 bp, Homo sapiens
ccccgccccgcg

SEQ ID NO: 17 - DNA, 2700 bp, Homo sapiens
  source: /note="See specification as filed for detailed description of substitutions and preferred embodiments"
ggggccggggccggggccggggccggggccggggccggggccggggccggggccggggccggggccggggccggggccggggccggggccggggccggggccggggccggggccggggccggggccggggccggggccggggccggggccggggccggggccggggccggggccggggccggggccggggccggggccggggccggggccggggccggggccggggccggggccggggccggggccggggccggggccggggccggggccggggccggggccggggccggggccggggccggggccggggccggggccggggccggggccggggccggggccggggccggggccggggccggggccggggccggggccggggccggggccggggccggggccggggccggggccggggccggggccggggccggggccggggccggggccggggccggggccggggccggggccggggccggggccggggccggggccggggccggggccggggccggggccggggccggggccggggccggggccggggccggggccggggccggggccggggccggggccggggccggggccggggccggggccggggccggggccggggccggggccggggccggggccggggccggggccggggccggggccggggccggggccggggccggggccggggccggggccggggccggggccggggccggggccggggccggggccggggccggggccggggccggggccggggccggggccggggccggggccggggccggggccggggccggggccggggccggggccggggccggggccggggccggggccggggccggggccggggccggggccggggccggggccggggccggggccggggccggggccggggccggggccggggccggggccggggccggggccggggccggggccggggccggggccggggccggggccggggccggggccggggccggggccggggccggggccggggccggggccggggccggggccggggccggggccggggccggggccggggccggggccggggccggggccggggccggggccggggccggggccggggccggggccggggccggggccggggccggggccggggccggggccggggccggggccggggccggggccggggccggggccggggccggggccggggccggggccggggccggggccggggccggggccggggccggggccggggccggggccggggccggggccggggccggggccggggccggggccggggccggggccggggccggggccggggccggggccggggccggggccggggccggggccggggccggggccggggccggggccggggccggggccggggccggggccggggccggggccggggccggggccggggccggggccggggccggggccggggccggggccggggccggggccggggccggggccggggccggggccggggccggggccggggccggggccggggccggggccggggccggggccggggccggggccggggccggggccggggccggggccggggccggggccggggccggggccggggccggggccggggccggggccggggccggggccggggccggggccggggccggggccggggccggggccggggccggggccggggccggggccggggccggggccggggccggggccggggccggggccggggccggggccggggccggggccggggccggggccggggccggggccggggccggggccggggccggggccggggccggggccggggccggggccggggccggggccggggccggggccggggccggggccggggccggggccggggccggggccggggccggggccggggccggggccggggccggggccggggccggggccggggccggggccggggccggggccggggccggggccggggccggggccggggccggggccggggccggggccggggccggggccggggccggggccggggccggggccggggccggggccggggccggggccggggccggggccggggccggggccggggccggggccggggccggggccggggccggggccggggccggggccggggccggggccggggccggggccggggccggggccggggccggggccggggccggggccggggccggggccggggccggggccggggccggggccggggccggggccggggccggggccggggccggggccggggccggggccggggccggggccggggccggggccggggccggggccggggccggggccggggccggggccggggccggggccggggccggggccggggccggggccggggccggggccggggccggggccggggccggggccggggccggggccggggccggggccggggccggggccggggccggggccggggccggggccggggccggggccggggccggggccggggccggggccggggccggggccggggccggggccggggccggggccggggccggggccggggccggggccggggccggggccggggccggggccggggccggggccggggccggggccggggccggggccggggccggggccggggccggggccggggccggggccggggccggggccggggcc

SEQ ID NO: 18 - protein, 16 aa, Unknown
  source: /note="Description of Unknown: RFGF sequence"
AAVALLPAVLLALLAP

SEQ ID NO: 19 - protein, 11 aa, Unknown
  source: /note="Description of Unknown: RFGF analogue sequence"
AALLPVLLAAP

SEQ ID NO: 20 - protein, 13 aa, Human immunodeficiency virus
GRKKRRQRRRPPQ

SEQ ID NO: 21 - protein, 16 aa, Drosophila sp.
RQIKIWFQNRRMKWKK

SEQ ID NO: 22 - DNA, 3000 bp, Artificial Sequence
  source: /note="Description of Artificial Sequence: Synthetic polynucleotide"
ggggccggggccggggccggggccggggccggggccggggccggggccggggccggggccggggccggggccggggccggggccggggccggggccggggccggggccggggccggggccggggccggggccggggccggggccggggccggggccggggccggggccggggccggggccggggccggggccggggccggggccggggccggggccggggccggggccggggccggggccggggccggggccggggccggggccggggccggggccggggccggggccggggccggggccggggccggggccggggccggggccggggccggggccggggccggggccggggccggggccggggccggggccggggccggggccggggccggggccggggccggggccggggccggggccggggccggggccggggccggggccggggccggggccggggccggggccggggccggggccggggccggggccggggccggggccggggccggggccggggccggggccggggccggggccggggccggggccggggccggggccggggccggggccggggccggggccggggccggggccggggccggggccggggccggggccggggccggggccggggccggggccggggccggggccggggccggggccggggccggggccggggccggggccggggccggggccggggccggggccggggccggggccggggccggggccggggccggggccggggccggggccggggccggggccggggccggggccggggccggggccggggccggggccggggccggggccggggccggggccggggccggggccggggccggggccggggccggggccggggccggggccggggccggggccggggccggggccggggccggggccggggccggggccggggccggggccggggccggggccggggccggggccggggccggggccggggccggggccggggccggggccggggccggggccggggccggggccggggccggggccggggccggggccggggccggggccggggccggggccggggccggggccggggccggggccggggccggggccggggccggggccggggccggggccggggccggggccggggccggggccggggccggggccggggccggggccggggccggggccggggccggggccggggccggggccggggccggggccggggccggggccggggccggggccggggccggggccggggccggggccggggccggggccggggccggggccggggccggggccggggccggggccggggccggggccggggccggggccggggccggggccggggccggggccggggccggggccggggccggggccggggccggggccggggccggggccggggccggggccggggccggggccggggccggggccggggccggggccggggccggggccggggccggggccggggccggggccggggccggggccggggccggggccggggccggggccggggccggggccggggccggggccggggccggggccggggccggggccggggccggggccggggccggggccggggccggggccggggccggggccggggccggggccggggccggggccggggccggggccggggccggggccggggccggggccggggccggggccggggccggggccggggccggggccggggccggggccggggccggggccggggccggggccggggccggggccggggccggggccggggccggggccggggccggggccggggccggggccggggccggggccggggccggggccggggccggggccggggccggggccggggccggggccggggccggggccggggccggggccggggccggggccggggccggggccggggccggggccggggccggggccggggccggggccggggccggggccggggccggggccggggccggggccggggccggggccggggccggggccggggccggggccggggccggggccggggccggggccggggccggggccggggccggggccggggccggggccggggccggggccggggccggggccggggccggggccggggccggggccggggccggggccggggccggggccggggccggggccggggccggggccggggccggggccggggccggggccggggccggggccggggccggggccggggccggggccggggccggggccggggccggggccggggccggggccggggccggggccggggccggggccggggccggggccggggccggggccggggccggggccggggccggggccggggccggggccggggccggggccggggccggggccggggccggggccggggccggggccggggccggggccggggccggggccggggccggggccggggccggggccggggccggggccggggccggggccggggccggggccggggccggggccggggccggggccggggccggggccggggccggggccggggccggggccggggccggggccggggccggggccggggccggggccggggccggggccggggccggggccggggccggggccggggccggggccggggccggggccggggccggggccggggccggggccggggccggggccggggccggggccggggccggggccggggccggggccggggccggggccggggccggggccggggccggggccggggccggggccggggccggggccggggccggggccggggccggggccggggccggggccggggccggggccggggccggggccggggccggggccggggccggggccggggccggggccggggccggggccggggccggggccggggccggggccggggccggggccggggccggggccggggccggggccggggccggggccggggccggggcc

SEQ ID NO: 23 - RNA, 19 nt, Artificial Sequence
  source: /note="Description of Artificial Sequence: Synthetic oligonucleotide"
cuuuuuguccgacaucuuu

SEQ ID NO: 24 - RNA, 19 nt, Artificial Sequence
  source: /note="Description of Artificial Sequence: Synthetic oligonucleotide"
uuuuuguccgacaucuugu

SEQ ID NO: 25 - RNA, 19 nt, Artificial Sequence
  source: /note="Description of Artificial Sequence: Synthetic oligonucleotide"
uuuuguccgacaucuugau

SEQ ID NO: 26 - RNA, 19 nt, Artificial Sequence
  source: /note="Description of Artificial Sequence: Synthetic oligonucleotide"
uuuguccgacaucuugacu

SEQ ID NO: 27 - RNA, 19 nt, Artificial Sequence
  source: /note="Description of Artificial Sequence: Synthetic oligonucleotide"
uuguccgacaucuugacgu

SEQ ID NO: 28 - RNA, 19 nt, Artificial Sequence
  source: /note="Description of Artificial Sequence: Synthetic oligonucleotide"
uguccgacaucuugacgau

SEQ ID NO: 29 - RNA, 19 nt, Artificial Sequence
  source: /note="Description of Artificial Sequence: Synthetic oligonucleotide"
guccgacaucuugacgagu

SEQ ID NO: 30 - RNA, 19 nt, Artificial Sequence
  source: /note="Description of Artificial Sequence: Synthetic oligonucleotide"
uccgacaucuugacgaggu

SEQ ID NO: 31 - RNA, 19 nt, Artificial Sequence
  source: /note="Description of Artificial Sequence: Synthetic oligonucleotide"
ccgacaucuugacgaggcu

SEQ ID NO: 32 - RNA, 19 nt, Artificial Sequence
  source: /note="Description of Artificial Sequence: Synthetic oligonucleotide"
cgacaucuugacgaggcuu

SEQ ID NO: 33 - RNA, 19 nt, Artificial Sequence
  source: /note="Description of Artificial Sequence: Synthetic oligonucleotide"
gacaucuugacgaggcugu

SEQ ID NO: 34 - RNA, 19 nt, Artificial Sequence
  source: /note="Description of Artificial Sequence: Synthetic oligonucleotide"
acaucuugacgaggcugcu

SEQ ID NO: 35 - RNA, 19 nt, Artificial Sequence
  source: /note="Description of Artificial Sequence: Synthetic oligonucleotide"
caucuugacgaggcugcgu

SEQ ID NO: 36 - RNA, 19 nt, Artificial Sequence
  source: /note="Description of Artificial Sequence: Synthetic oligonucleotide"
aucuugacgaggcugcggu

SEQ ID NO: 37 - RNA, 19 nt, Artificial Sequence
  source: /note="Description of Artificial Sequence: Synthetic oligonucleotide"
ucuugacgaggcugcgguu

SEQ ID NO: 38 - RNA, 19 nt, Artificial Sequence
  source: /note="Description of Artificial Sequence: Synthetic oligonucleotide"
cuugacgaggcugcggugu

SEQ ID NO: 39 - RNA, 19 nt, Artificial Sequence
  source: /note="Description of Artificial Sequence: Synthetic oligonucleotide"
uugacgaggcugcgguguu

SEQ ID NO: 40 - RNA, 19 nt, Artificial Sequence
  source: /note="Description of Artificial Sequence: Synthetic oligonucleotide"
ugacgaggcugcggugucu

SEQ ID NO: 41 - RNA, 19 nt, Artificial Sequence
  source: /note="Description of Artificial Sequence: Synthetic oligonucleotide"
gacgaggcugcggugucuu

SEQ ID NO: 42 - RNA, 19 nt, Artificial Sequence
  source: /note="Description of Artificial Sequence: Synthetic oligonucleotide"
acgaggcugcggugucugu

SEQ ID NO: 43 - RNA, 19 nt, Artificial Sequence
  source: /note="Description of Artificial Sequence: Synthetic oligonucleotide"
cgaggcugcggugucugcu

SEQ ID NO: 44 - RNA, 19 nt, Artificial Sequence
  source: /note="Description of Artificial Sequence: Synthetic oligonucleotide"
gaggcugcggugucugcuu

SEQ ID NO: 45 - RNA, 19 nt, Artificial Sequence
  source: /note="Description of Artificial Sequence: Synthetic oligonucleotide"
aggcugcggugucugcugu

SEQ ID NO: 46 - RNA, 19 nt, Artificial Sequence
  source: /note="Description of Artificial Sequence: Synthetic oligonucleotide"
ggcugcggugucugcugcu

SEQ ID NO: 47 - RNA, 19 nt, Artificial Sequence
  source: /note="Description of Artificial Sequence: Synthetic oligonucleotide"
gcugcggugucugcugcuu

SEQ ID NO: 48 - RNA, 19 nt, Artificial Sequence
  source: /note="Description of Artificial Sequence: Synthetic oligonucleotide"
cugcggugucugcugcuau

SEQ ID NO: 49 - RNA, 19 nt, Artificial Sequence
  source: /note="Description of Artificial Sequence: Synthetic oligonucleotide"
ugcggugucugcugcuauu

SEQ ID NO: 50 - RNA, 19 nt, Artificial Sequence
  source: /note="Description of Artificial Sequence: Synthetic oligonucleotide"
gcggugucugcugcuauuu

SEQ ID NO: 51 - RNA, 19 nt, Artificial Sequence
  source: /note="Description of Artificial Sequence: Synthetic oligonucleotide"
cggugucugcugcuauucu

SEQ ID NO: 52 - RNA, 19 nt, Artificial Sequence
  source: /note="Description of Artificial Sequence: Synthetic oligonucleotide"
ggugucugcugcuauucuu

SEQ ID NO: 53 - RNA, 19 nt, Artificial Sequence
  source: /note="Description of Artificial Sequence: Synthetic oligonucleotide"
gugucugcugcuauucucu

SEQ ID NO: 54 - RNA, 19 nt, Artificial Sequence
  source: /note="Description of Artificial Sequence: Synthetic oligonucleotide"
ugucugcugcuauucuccu

SEQ ID NO: 55 - RNA, 19 nt, Artificial Sequence
  source: /note="Description of Artificial Sequence: Synthetic oligonucleotide"
gucugcugcuauucuccgu

SEQ ID NO: 56 - RNA, 19 nt, Artificial Sequence
  source: /note="Description of Artificial Sequence: Synthetic oligonucleotide"
ucugcugcuauucuccgau

SEQ ID NO: 57 - RNA, 19 nt, Artificial Sequence
  source: /note="Description of Artificial Sequence: Synthetic oligonucleotide"
cugcugcuauucuccgagu

SEQ ID NO: 58 - RNA, 19 nt, Artificial Sequence
  source: /note="Description of Artificial Sequence: Synthetic oligonucleotide"
ugcugcuauucuccgagcu

SEQ ID NO: 59 - RNA, 19 nt, Artificial Sequence
  source: /note="Description of Artificial Sequence: Synthetic oligonucleotide"
gcugcuauucuccgagcuu

SEQ ID NO: 60 - RNA, 19 nt, Artificial Sequence
  source: /note="Description of Artificial Sequence: Synthetic oligonucleotide"
cugcuauucuccgagcuuu

SEQ ID NO: 61 - RNA, 19 nt, Artificial Sequence
  source: /note="Description of Artificial Sequence: Synthetic oligonucleotide"
ugcuauucuccgagcuucu

SEQ ID NO: 62 - RNA, 19 nt, Artificial Sequence
  source: /note="Description of Artificial Sequence: Synthetic oligonucleotide"
gcuauucuccgagcuucgu

SEQ ID NO: 63 - RNA, 19 nt, Artificial Sequence
  source: /note="Description of Artificial Sequence: Synthetic oligonucleotide"
cuauucuccgagcuucgcu

SEQ ID NO: 64 - RNA, 19 nt, Artificial Sequence
  source: /note="Description of Artificial Sequence: Synthetic oligonucleotide"
uauucuccgagcuucgcau

SEQ ID NO: 65 - RNA, 19 nt, Artificial Sequence
  source: /note="Description of Artificial Sequence: Synthetic oligonucleotide"
auucuccgagcuucgcaau

SEQ ID NO: 66 - RNA, 19 nt, Artificial Sequence
  source: /note="Description of Artificial Sequence: Synthetic oligonucleotide"
uucuccgagcuucgcaauu

SEQ ID NO: 67 - RNA, 19 nt, Artificial Sequence
  source: /note="Description of Artificial Sequence: Synthetic oligonucleotide"
ucuccgagcuucgcaaugu

SEQ ID NO: 68 - RNA, 19 nt, Artificial Sequence
  source: /note="Description of Artificial Sequence: Synthetic oligonucleotide"
cuccgagcuucgcaaugcu

SEQ ID NO: 69 - RNA, 19 nt, Artificial Sequence
  source: /note="Description of Artificial Sequence: Synthetic oligonucleotide"
uccgagcuucgcaaugccu

SEQ ID NO: 70 - RNA, 19 nt, Artificial Sequence
  source: /note="Description of Artificial Sequence: Synthetic oligonucleotide"
ccgagcuucgcaaugccgu

SEQ ID NO: 71 - RNA, 19 nt, Artificial Sequence
  source: /note="Description of Artificial Sequence: Synthetic oligonucleotide"
cgagcuucgcaaugccgcu

SEQ ID NO: 72 - RNA, 19 nt, Artificial Sequence
  source: /note="Description of Artificial Sequence: Synthetic oligonucleotide"
gagcuucgcaaugccgccu

SEQ ID NO: 73 - RNA, 19 nt, Artificial Sequence
  source: /note="Description of Artificial Sequence: Synthetic oligonucleotide"
agcuucgcaaugccgccuu

SEQ ID NO: 74 - RNA, 19 nt, Artificial Sequence
  source: /note="Description of Artificial Sequence: Synthetic oligonucleotide"
gcuucgcaaugccgccuau

SEQ ID NO: 75 - RNA, 19 nt, Artificial Sequence
  source: /note="Description of Artificial Sequence: Synthetic oligonucleotide"
cuucgcaaugccgccuaau

SEQ ID NO: 76 - RNA, 19 nt, Artificial Sequence
  source: /note="Description of Artificial Sequence: Synthetic oligonucleotide"
uucgcaaugccgccuaagu

SEQ ID NO: 77 - RNA, 19 nt, Artificial Sequence
  source: /note="Description of Artificial Sequence: Synthetic oligonucleotide"
ucgcaaugccgccuaaggu

SEQ ID NO: 78 - RNA, 19 nt, Artificial Sequence
  source: /note="Description of Artificial Sequence: Synthetic oligonucleotide"
cgcaaugccgccuaaggau

SEQ ID NO: 79 - RNA, 19 nt, Artificial Sequence
  source: /note="Description of Artificial Sequence: Synthetic oligonucleotide"
gcaaugccgccuaaggacu

SEQ ID NO: 80 - RNA, 19 nt, Artificial Sequence
  source: /note="Description of Artificial Sequence: Synthetic oligonucleotide"
caaugccgccuaaggacgu

SEQ ID NO: 81 - RNA, 19 nt, Artificial Sequence
  source: /note="Description of Artificial Sequence: Synthetic oligonucleotide"
aaugccgccuaaggacgau

SEQ ID NO: 82 - RNA, 19 nt, Artificial Sequence
  source: /note="Description of Artificial Sequence: Synthetic oligonucleotide"
augccgccuaaggacgacu

SEQ ID NO: 83 - RNA, 19 nt, Artificial Sequence
  source: /note="Description of Artificial Sequence: Synthetic oligonucleotide"
ugccgccuaaggacgacau

SEQ ID NO: 84 - RNA, 19 nt, Artificial Sequence
  source: /note="Description of Artificial Sequence: Synthetic oligonucleotide"
gccgccuaaggacgacaau

SEQ ID NO: 85 - RNA, 19 nt, Artificial Sequence
  source: /note="Description of Artificial Sequence: Synthetic oligonucleotide"
ccgccuaaggacgacaagu

SEQ ID NO: 86 - RNA, 19 nt, Artificial Sequence
  source: /note="Description of Artificial Sequence: Synthetic oligonucleotide"
cgccuaaggacgacaagau

SEQ ID NO: 87 - RNA, 19 nt, Artificial Sequence
  source: /note="Description of Artificial Sequence: Synthetic oligonucleotide"
gccuaaggacgacaagaau

SEQ ID NO: 88 - RNA, 19 nt, Artificial Sequence
  source: /note="Description of Artificial Sequence: Synthetic oligonucleotide"
ccuaaggacgacaagaagu

SEQ ID NO: 89 - RNA, 19 nt, Artificial Sequence
  source: /note="Description of Artificial Sequence: Synthetic oligonucleotide"
cuaaggacgacaagaagau

SEQ ID NO: 90 - RNA, 19 nt, Artificial Sequence
  source: /note="Description of Artificial Sequence: Synthetic oligonucleotide"
uaaggacgacaagaagaau

SEQ ID NO: 91 - RNA, 19 nt, Artificial Sequence
  source: /note="Description of Artificial Sequence: Synthetic oligonucleotide"
aaggacgacaagaagaagu

SEQ ID NO: 92 - RNA, 19 nt, Artificial Sequence
  source: /note="Description of Artificial Sequence: Synthetic oligonucleotide"
aggacgacaagaagaagau

SEQ ID NO: 93 - RNA, 19 nt, Artificial Sequence
  source: /note="Description of Artificial Sequence: Synthetic oligonucleotide"
ggacgacaagaagaagaau

SEQ ID NO: 94 - RNA, 19 nt, Artificial Sequence
  source: /note="Description of Artificial Sequence: Synthetic oligonucleotide"
gacgacaagaagaagaagu

SEQ ID NO: 95 - RNA, 19 nt, Artificial Sequence
  source: /note="Description of Artificial Sequence: Synthetic oligonucleotide"
acgacaagaagaagaaggu

SEQ ID NO: 96 - RNA, 19 nt, Artificial Sequence
  source: /note="Description of Artificial Sequence: Synthetic oligonucleotide"
cgacaagaagaagaaggau

SEQ ID NO: 97 - RNA, 19 nt, Artificial Sequence
  source: /note="Description of Artificial Sequence: Synthetic oligonucleotide"
gacaagaagaagaaggacu

SEQ ID NO: 98 - RNA, 19 nt, Artificial Sequence
  source: /note="Description of Artificial Sequence: Synthetic oligonucleotide"
acaagaagaagaaggacgu

SEQ ID NO: 99 - RNA, 19 nt, Artificial Sequence
  source: /note="Description of Artificial Sequence: Synthetic oligonucleotide"
caagaagaagaaggacgcu

SEQ ID NO: 100 - RNA, 19 nt, Artificial Sequence
  source: /note="Description of Artificial Sequence: Synthetic oligonucleotide"
aagaagaagaaggacgcuu

SEQ ID NO: 101 - RNA, 19 nt, Artificial Sequence
  source: /note="Description of Artificial Sequence: Synthetic oligonucleotide"
agaagaagaaggacgcugu

SEQ ID NO: 102 - RNA, 19 nt, Artificial Sequence
  source: /note="Description of Artificial Sequence: Synthetic oligonucleotide"
gaagaagaaggacgcuggu

SEQ ID NO: 103 - RNA, 19 nt, Artificial Sequence
  source: /note="Description of Artificial Sequence: Synthetic oligonucleotide"
aagaagaaggacgcuggau

SEQ ID NO: 104 - RNA, 19 nt, Artificial Sequence
  source: /note="Description of Artificial Sequence: Synthetic oligonucleotide"
agaagaaggacgcuggaau

SEQ ID NO: 105 - RNA, 19 nt, Artificial Sequence
  source: /note="Description of Artificial Sequence: Synthetic oligonucleotide"
gaagaaggacgcuggaaau

SEQ ID NO: 106 - RNA, 19 nt, Artificial Sequence
  source: /note="Description of Artificial Sequence: Synthetic oligonucleotide"
aagaaggacgcuggaaagu

SEQ ID NO: 107 - RNA, 19 nt, Artificial Sequence
  source: /note="Description of Artificial Sequence: Synthetic oligonucleotide"
agaaggacgcuggaaaguu

SEQ ID NO: 108 - RNA, 19 nt, Artificial Sequence
  source: /note="Description of Artificial Sequence: Synthetic oligonucleotide"
gaaggacgcuggaaagucu

SEQ ID NO: 109 - RNA, 19 nt, Artificial Sequence
  source: /note="Description of Artificial Sequence: Synthetic oligonucleotide"
aaggacgcuggaaagucgu

SEQ ID NO: 110 - RNA, 19 nt, Artificial Sequence
  source: /note="Description of Artificial Sequence: Synthetic oligonucleotide"
aggacgcuggaaagucggu

SEQ ID NO: 111 - RNA, 19 nt, Artificial Sequence
  source: /note="Description of Artificial Sequence: Synthetic oligonucleotide"
ggacgcuggaaagucggcu

SEQ ID NO: 112 - RNA, 19 nt, Artificial Sequence
  source: /note="Description of Artificial Sequence: Synthetic oligonucleotide"
gacgcuggaaagucggccu

SEQ ID NO: 113 - RNA, 19 nt, Artificial Sequence
  source: /note="Description of Artificial Sequence: Synthetic oligonucleotide"
acgcuggaaagucggccau

SEQ ID NO: 114 - RNA, 19 nt, Artificial Sequence
  source: /note="Description of Artificial Sequence: Synthetic oligonucleotide"
cgcuggaaagucggccaau

SEQ ID NO: 115 - RNA, 19 nt, Artificial Sequence
  source: /note="Description of Artificial Sequence: Synthetic oligonucleotide"
gcuggaaagucggccaagu

SEQ ID NO: 116 - RNA, 19 nt, Artificial Sequence
  source: /note="Description of Artificial Sequence: Synthetic oligonucleotide"
cuggaaagucggccaagau

SEQ ID NO: 117 - RNA, 19 nt, Artificial Sequence
  source: /note="Description of Artificial Sequence: Synthetic oligonucleotide"
uggaaagucggccaagaau

SEQ ID NO: 118 - RNA, 19 nt, Artificial Sequence
  source: /note="Description of Artificial Sequence: Synthetic oligonucleotide"
ggaaagucggccaagaaau

SEQ ID NO: 119 - RNA, 19 nt, Artificial Sequence
  source: /note="Description of Artificial Sequence: Synthetic oligonucleotide"
gaaagucggccaagaaagu

SEQ ID NO: 120 - RNA, 19 nt, Artificial Sequence
  source: /note="Description of Artificial Sequence: Synthetic oligonucleotide"
aaagucggccaagaaagau

SEQ ID NO: 121 - RNA, 19 nt, Artificial Sequence
  source: /note="Description of Artificial Sequence: Synthetic oligonucleotide"
aagucggccaagaaagacu

SEQ ID NO: 122 - RNA, 19 nt, Artificial Sequence
  source: /note="Description of Artificial Sequence: Synthetic oligonucleotide"
agucggccaagaaagacau

SEQ ID NO: 123 - RNA, 19 nt, Artificial Sequence
  source: /note="Description of Artificial Sequence: Synthetic oligonucleotide"
gucggccaagaaagacaau

SEQ ID NO: 124 - RNA, 19 nt, Artificial Sequence
  source: /note="Description of Artificial Sequence: Synthetic oligonucleotide"
ucggccaagaaagacaaau

SEQ ID NO: 125 - RNA, 19 nt, Artificial Sequence
  source: /note="Description of Artificial Sequence: Synthetic oligonucleotide"
cggccaagaaagacaaagu

SEQ ID NO: 126 - RNA, 19 nt, Artificial Sequence
  source: /note="Description of Artificial Sequence: Synthetic oligonucleotide"
ggccaagaaagacaaagau

SEQ ID NO: 127 - RNA, 19 nt, Artificial Sequence
  source: /note="Description of Artificial Sequence: Synthetic oligonucleotide"
gccaagaaagacaaagacu

SEQ ID NO: 128 - RNA, 19 nt, Artificial Sequence
  source: /note="Description of Artificial Sequence: Synthetic oligonucleotide"
ccaagaaagacaaagaccu

SEQ ID NO: 129 - RNA, 19 nt, Artificial Sequence
  source: /note="Description of Artificial Sequence: Synthetic oligonucleotide"
caagaaagacaaagacccu

SEQ ID NO: 130 - RNA, 19 nt, Artificial Sequence
  source: /note="Description of Artificial Sequence: Synthetic oligonucleotide"
agaaagacaaagacccagu

SEQ ID NO: 131 - RNA, 19 nt, Artificial Sequence
  source: /note="Description of Artificial Sequence: Synthetic oligonucleotide"
gaaagacaaagacccaguu

SEQ ID NO: 132 - RNA, 19 nt, Artificial Sequence
  source: /note="Description of Artificial Sequence: Synthetic oligonucleotide"
aaagacaaagacccagugu

SEQ ID NO: 133 - RNA, 19 nt, Artificial Sequence
  source: /note="Description of Artificial Sequence: Synthetic oligonucleotide"
aagacaaagacccagugau

SEQ ID NO: 134 - RNA, 19 nt, Artificial Sequence
  source: /note="Description of Artificial Sequence: Synthetic oligonucleotide"
agacaaagacccagugaau

SEQ ID NO: 135 - RNA, 19 nt, Artificial Sequence
  source: /note="Description of Artificial Sequence: Synthetic oligonucleotide"
gacaaagacccagugaacu

SEQ ID NO: 136 - RNA, 19 nt, Artificial Sequence
  source: /note="Description of Artificial Sequence: Synthetic oligonucleotide"
acaaagacccagugaacau

SEQ ID NO: 137 - RNA, 19 nt, Artificial Sequence
  source: /note="Description of Artificial Sequence: Synthetic oligonucleotide"
caaagacccagugaacaau

SEQ ID NO: 138 - RNA, 19 nt, Artificial Sequence
  source: /note="Description of Artificial Sequence: Synthetic oligonucleotide"
aaagacccagugaacaaau

SEQ ID NO: 139 - RNA, 19 nt, Artificial Sequence
  source: /note="Description of Artificial Sequence: Synthetic oligonucleotide"
aagacccagugaacaaauu

SEQ ID NO: 140 - RNA, 19 nt, Artificial Sequence
  source: /note="Description of Artificial Sequence: Synthetic oligonucleotide"
agacccagugaacaaaucu

SEQ ID NO: 141 - RNA, 19 nt, Artificial Sequence
  source: /note="Description of Artificial Sequence: Synthetic oligonucleotide"
gacccagugaacaaauccu

SEQ ID NO: 142 - RNA, 19 nt, Artificial Sequence
  source: /note="Description of Artificial Sequence: Synthetic oligonucleotide"
acccagugaacaaauccgu

SEQ ID NO: 143 - RNA, 19 nt, Artificial Sequence
  source: /note="Description of Artificial Sequence: Synthetic oligonucleotide"
cccagugaacaaauccggu

SEQ ID NO: 144 - RNA, 19 nt, Artificial Sequence
  source: /note="Description of Artificial Sequence: Synthetic oligonucleotide"
gggcaaggccaaaaagaau

SEQ ID NO: 145 - RNA, 19 nt, Artificial Sequence
  source: /note="Description of Artificial Sequence: Synthetic oligonucleotide"
ggcaaggccaaaaagaagu

SEQ ID NO: 146 - RNA, 19 nt, Artificial Sequence
  source: /note="Description of Artificial Sequence: Synthetic oligonucleotide"
gcaaggccaaaaagaagau

SEQ ID NO: 147 - RNA, 19 nt, Artificial Sequence
  source: /note="Description of Artificial Sequence: Synthetic oligonucleotide"
aggccaaaaagaagaaguu

SEQ ID NO: 148 - RNA, 19 nt, Artificial Sequence
  source: /note="Description of Artificial Sequence: Synthetic oligonucleotide"
ggccaaaaagaagaagugu

SEQ ID NO: 149 - RNA, 19 nt, Artificial Sequence
  source: /note="Description of Artificial Sequence: Synthetic oligonucleotide"
gccaaaaagaagaaguggu

SEQ ID NO: 150 - RNA, 19 nt, Artificial Sequence
  source: /note="Description of Artificial Sequence: Synthetic oligonucleotide"
ccaaaaagaagaagugguu

SEQ ID NO: 151 - RNA, 19 nt, Artificial Sequence
  source: /note="Description of Artificial Sequence: Synthetic oligonucleotide"
caaaaagaagaaguggucu

SEQ ID NO: 152 - RNA, 19 nt, Artificial Sequence
  source: /note="Description of Artificial Sequence: Synthetic oligonucleotide"
aaaaagaagaagugguccu

SEQ ID NO: 153 - RNA, 19 nt, Artificial Sequence
  source: /note="Description of Artificial Sequence: Synthetic oligonucleotide"
aaaagaagaagugguccau

SEQ ID NO: 154 - RNA, 19 nt, Artificial Sequence
  source: /note="Description of Artificial Sequence: Synthetic oligonucleotide"
aaagaagaagugguccaau

SEQ ID NO: 155 - RNA, 19 nt, Artificial Sequence
  source: /note="Description of Artificial Sequence: Synthetic oligonucleotide"
aagaagaagugguccaaau

SEQ ID NO: 156 - RNA, 19 nt, Artificial Sequence
  source: /note="Description of Artificial Sequence: Synthetic oligonucleotide"
agaagaagugguccaaagu

SEQ ID NO: 157 - RNA, 19 nt, Artificial Sequence
  source: /note="Description of Artificial Sequence: Synthetic oligonucleotide"
gaagaagugguccaaaggu

SEQ ID NO: 158 - RNA, 19 nt, Artificial Sequence
  source: /note="Description of Artificial Sequence: Synthetic oligonucleotide"
aagaagugguccaaaggcu

SEQ ID NO: 159 - RNA, 19 nt, Artificial Sequence
  source: /note="Description of Artificial Sequence: Synthetic oligonucleotide"
agaagugguccaaaggcau

SEQ ID NO: 160 - RNA, 19 nt, Artificial Sequence
  source: /note="Description of Artificial Sequence: Synthetic oligonucleotide"
gaagugguccaaaggcaau

SEQ ID NO: 161 - RNA, 19 nt, Artificial Sequence
  source: /note="Description of Artificial Sequence: Synthetic oligonucleotide"
aagugguccaaaggcaaau

SEQ ID NO: 162 - RNA, 19 nt, Artificial Sequence
  source: /note="Description of Artificial Sequence: Synthetic oligonucleotide"
agugguccaaaggcaaagu

SEQ ID NO: 163 - RNA, 19 nt, Artificial Sequence
  source: /note="Description of Artificial Sequence: Synthetic oligonucleotide"
gugguccaaaggcaaaguu

SEQ ID NO: 164 - RNA, 19 nt, Artificial Sequence
  source: /note="Description of Artificial Sequence: Synthetic oligonucleotide"
ugguccaaaggcaaaguuu

SEQ ID NO: 165 - RNA, 19 nt, Artificial Sequence
  source: /note="Description of Artificial Sequence: Synthetic oligonucleotide"
gguccaaaggcaaaguucu

SEQ ID NO: 166 - RNA, 19 nt, Artificial Sequence
  source: /note="Description of Artificial Sequence: Synthetic oligonucleotide"
guccaaaggcaaaguucgu

SEQ ID NO: 167 - RNA, 19 nt, Artificial Sequence
  source: /note="Description of Artificial Sequence: Synthetic oligonucleotide"
uccaaaggcaaaguucggu

SEQ ID NO: 168 - RNA, 19 nt, Artificial Sequence
  source: /note="Description of Artificial Sequence: Synthetic oligonucleotide"
ccaaaggcaaaguucgggu

SEQ ID NO: 169 - RNA, 19 nt, Artificial Sequence
  source: /note="Description of Artificial Sequence: Synthetic oligonucleotide"
caaaggcaaaguucgggau

SEQ ID NO: 170 - RNA, 19 nt, Artificial Sequence
  source: /note="Description of Artificial Sequence: Synthetic oligonucleotide"
aaaggcaaaguucgggacu

SEQ ID NO: 171 - RNA, 19 nt, Artificial Sequence
  source: /note="Description of Artificial Sequence: Synthetic oligonucleotide"
aaggcaaaguucgggacau

SEQ ID NO: 172 - RNA, 19 nt, Artificial Sequence
  source: /note="Description of Artificial Sequence: Synthetic oligonucleotide"
aggcaaaguucgggacaau

SEQ ID NO: 173 - RNA, 19 nt, Artificial Sequence
  source: /note="Description of Artificial Sequence: Synthetic oligonucleotide"
ggcaaaguucgggacaagu

SEQ ID NO: 174 - RNA, 19 nt, Artificial Sequence
  source: /note="Description of Artificial Sequence: Synthetic oligonucleotide"
gcaaaguucgggacaagcu

SEQ ID NO: 175 - RNA, 19 nt, Artificial Sequence
  source: /note="Description of Artificial Sequence: Synthetic oligonucleotide"
caaaguucgggacaagcuu

SEQ ID NO: 176 - RNA, 19 nt, Artificial Sequence
  source: /note="Description of Artificial Sequence: Synthetic oligonucleotide"
aaaguucgggacaagcucu

SEQ ID NO: 177 - RNA, 19 nt, Artificial Sequence
  source: /note="Description of Artificial Sequence: Synthetic oligonucleotide"
aaguucgggacaagcucau

SEQ ID NO: 178 - RNA, 19 nt, Artificial Sequence
  source: /note="Description of Artificial Sequence: Synthetic oligonucleotide"
aguucgggacaagcucaau

SEQ ID NO: 179 - RNA, 19 nt, Artificial Sequence
  source: /note="Description of Artificial Sequence: Synthetic oligonucleotide"
guucgggacaagcucaauu

SEQ ID NO: 180 - RNA, 19 nt, Artificial Sequence
  source: /note="Description of Artificial Sequence: Synthetic oligonucleotide"
uucgggacaagcucaauau

SEQ ID NO: 181 - RNA, 19 nt, Artificial Sequence
  source: /note="Description of Artificial Sequence: Synthetic oligonucleotide"
ucgggacaagcucaauaau

SEQ ID NO: 182 - RNA, 19 nt, Artificial Sequence
  source: /note="Description of Artificial Sequence: Synthetic oligonucleotide"
cgggacaagcucaauaacu

SEQ ID NO: 183 - RNA, 19 nt, Artificial Sequence
  source: /note="Description of Artificial Sequence: Synthetic oligonucleotide"
gggacaagcucaauaacuu

SEQ ID NO: 184 - RNA, 19 nt, Artificial Sequence
  source: /note="Description of Artificial Sequence: Synthetic oligonucleotide"
ggacaagcucaauaacuuu

SEQ ID NO: 185 - RNA, 19 nt, Artificial Sequence
  source: /note="Description of Artificial Sequence: Synthetic oligonucleotide"
gacaagcucaauaacuuau

SEQ ID NO: 186 - RNA, 19 nt, Artificial Sequence
  source: /note="Description of Artificial Sequence: Synthetic oligonucleotide"
acaagcucaauaacuuagu

SEQ ID NO: 187 - RNA, 19 nt, Artificial Sequence
  source: /note="Description of Artificial Sequence: Synthetic oligonucleotide"
caagcucaauaacuuaguu

SEQ ID NO: 188 - RNA, 19 nt, Artificial Sequence
  source: /note="Description of Artificial Sequence: Synthetic oligonucleotide"
aagcucaauaacuuagucu

SEQ ID NO: 189 - RNA, 19 nt, Artificial Sequence
  source: /note="Description of Artificial Sequence: Synthetic oligonucleotide"
agcucaauaacuuagucuu

SEQ ID NO: 190 - RNA, 19 nt, Artificial Sequence
  source: /note="Description of Artificial Sequence: Synthetic oligonucleotide"
gcucaauaacuuagucuuu

SEQ ID NO: 191 - RNA, 19 nt, Artificial Sequence
  source: /note="Description of Artificial Sequence: Synthetic oligonucleotide"
cucaauaacuuagucuugu

SEQ ID NO: 192 - RNA, 19 nt, Artificial Sequence
  source: /note="Description of Artificial Sequence: Synthetic oligonucleotide"
ucaauaacuuagucuuguu

SEQ ID NO: 193 - RNA, 19 nt, Artificial Sequence
  source: /note="Description of Artificial Sequence: Synthetic oligonucleotide"
caauaacuuagucuuguuu

SEQ ID NO: 194 - RNA, 19 nt, Artificial Sequence
  source: /note="Description of Artificial Sequence: Synthetic oligonucleotide"
aauaacuuagucuuguuuu

SEQ ID NO: 195 - RNA, 19 nt, Artificial Sequence
  source: /note="Description of Artificial Sequence: Synthetic oligonucleotide"
auaacuuagucuuguuugu

SEQ ID NO: 196 - RNA, 19 nt, Artificial Sequence
  source: /note="Description of Artificial Sequence: Synthetic oligonucleotide"
uaacuuagucuuguuugau

SEQ ID NO: 197 - RNA, 19 nt, Artificial Sequence
  source: /note="Description of Artificial Sequence: Synthetic oligonucleotide"
aacuuagucuuguuugacu

SEQ ID NO: 198 - RNA, 19 nt, Artificial Sequence
  source: /note="Description of Artificial Sequence: Synthetic oligonucleotide"
acuuagucuuguuugacau

SEQ ID NO: 199 - RNA, 19 nt, Artificial Sequence
  source: /note="Description of Artificial Sequence: Synthetic oligonucleotide"
cuuagucuuguuugacaau

SEQ ID NO: 200 - RNA, 19 nt, Artificial Sequence
  source: /note="Description of Artificial Sequence: Synthetic oligonucleotide"
uuagucuuguuugacaaau

SEQ ID NO: 201 - RNA, 19 nt, Artificial Sequence
  source: /note="Description of Artificial Sequence: Synthetic oligonucleotide"
uagucuuguuugacaaagu

SEQ ID NO: 202 - RNA, 19 nt, Artificial Sequence
  source: /note="Description of Artificial Sequence: Synthetic oligonucleotide"
agucuuguuugacaaagcu

SEQ ID NO: 203 - RNA, 19 nt, Artificial Sequence
  source: /note="Description of Artificial Sequence: Synthetic oligonucleotide"
gucuuguuugacaaagcuu

SEQ ID NO: 204 - RNA, 19 nt, Artificial Sequence
  source: /note="Description of Artificial Sequence: Synthetic oligonucleotide"
ucuuguuugacaaagcuau

SEQ ID NO: 205 - RNA, 19 nt, Artificial Sequence
  source: /note="Description of Artificial Sequence: Synthetic oligonucleotide"
cuuguuugacaaagcuacu

SEQ ID NO: 206 - RNA, 19 nt, Artificial Sequence
  source: /note="Description of Artificial Sequence: Synthetic oligonucleotide"
uuguuugacaaagcuaccu

SEQ ID NO: 207 - RNA, 19 nt, Artificial Sequence
  source: /note="Description of Artificial Sequence: Synthetic oligonucleotide"
uguuugacaaagcuaccuu

SEQ ID NO: 208 - RNA, 19 nt, Artificial Sequence
  source: /note="Description of Artificial Sequence: Synthetic oligonucleotide"
guuugacaaagcuaccuau

SEQ ID NO: 209 - RNA, 19 nt, Artificial Sequence
  source: /note="Description of Artificial Sequence: Synthetic oligonucleotide"
uuugacaaagcuaccuauu

SEQ ID NO: 210 - RNA, 19 nt, Artificial Sequence
  source: /note="Description of Artificial Sequence: Synthetic oligonucleotide"
uugacaaagcuaccuaugu

SEQ ID NO: 211 - RNA, 19 nt, Artificial Sequence
  source: /note="Description of Artificial Sequence: Synthetic oligonucleotide"
ugacaaagcuaccuaugau

SEQ ID NO: 212 - RNA, 19 nt, Artificial Sequence
  source: /note="Description of Artificial Sequence: Synthetic oligonucleotide"
gacaaagcuaccuaugauu

SEQ ID NO: 213 - RNA, 19 nt, Artificial Sequence
  source: /note="Description of Artificial Sequence: Synthetic oligonucleotide"
acaaagcuaccuaugauau

SEQ ID NO: 214 - RNA, 19 nt, Artificial Sequence
  source: /note="Description of Artificial Sequence: Synthetic oligonucleotide"
caaagcuaccuaugauaau

SEQ ID NO: 215 - RNA, 19 nt, Artificial Sequence
  source: /note="Description of Artificial Sequence: Synthetic oligonucleotide"
aaagcuaccuaugauaaau

SEQ ID NO: 216 - RNA, 19 nt, Artificial Sequence
  source: /note="Description of Artificial Sequence: Synthetic oligonucleotide"
aagcuaccuaugauaaacu

SEQ ID NO: 217 - RNA, 19 nt, Artificial Sequence
  source: /note="Description of Artificial Sequence: Synthetic oligonucleotide"
agcuaccuaugauaaacuu

SEQ ID NO: 218 - RNA, 19 nt, Artificial Sequence
  source: /note="Description of Artificial Sequence: Synthetic oligonucleotide"
gcuaccuaugauaaacucu

SEQ ID NO: 219 - RNA, 19 nt, Artificial Sequence
  source: /note="Description of Artificial Sequence: Synthetic oligonucleotide"
cuaccuaugauaaacucuu

SEQ ID NO: 220 - RNA, 19 nt, Artificial Sequence
  source: /note="Description of Artificial Sequence: Synthetic oligonucleotide"
uaccuaugauaaacucugu

SEQ ID NO: 221 - RNA, 19 nt, Artificial Sequence
  source: /note="Description of Artificial Sequence: Synthetic oligonucleotide"
accuaugauaaacucuguu

SEQ ID NO: 222 - RNA, 19 nt, Artificial Sequence
  source: /note="Description of Artificial Sequence: Synthetic oligonucleotide"
ccuaugauaaacucuguau

SEQ ID NO: 223 - RNA, 19 nt, Artificial Sequence
  source: /note="Description of Artificial Sequence: Synthetic oligonucleotide"
cuaugauaaacucuguaau

SEQ ID NO: 224 - RNA, 19 nt, Artificial Sequence
  source: /note="Description of Artificial Sequence: Synthetic oligonucleotide"
uaugauaaacucuguaagu

SEQ ID NO: 225 - RNA, 19 nt, Artificial Sequence
  source: /note="Description of Artificial Sequence: Synthetic oligonucleotide"
augauaaacucuguaaggu

SEQ ID NO: 226 - RNA, 19 nt, Artificial Sequence
  source: /note="Description of Artificial Sequence: Synthetic oligonucleotide"
ugauaaacucuguaaggau

SEQ ID NO: 227 - RNA, 19 nt, Artificial Sequence
  source: /note="Description of Artificial Sequence: Synthetic oligonucleotide"
gauaaacucuguaaggaau

SEQ ID NO: 228 - RNA, 19 nt, Artificial Sequence
  source: /note="Description of Artificial Sequence: Synthetic oligonucleotide"
auaaacucuguaaggaagu

SEQ ID NO: 229 - RNA, 19 nt, Artificial Sequence
  source: /note="Description of Artificial Sequence: Synthetic oligonucleotide"
uaaacucuguaaggaaguu

SEQ ID NO: 230 - RNA, 19 nt, Artificial Sequence
  source: /note="Description of Artificial Sequence: Synthetic oligonucleotide"
aaacucuguaaggaaguuu

SEQ ID NO: 231 - RNA, 19 nt, Artificial Sequence
  source: /note="Description of Artificial Sequence: Synthetic oligonucleotide"
aacucuguaaggaaguucu

SEQ ID NO: 232 - RNA, 19 nt, Artificial Sequence
  source: /note="Description of Artificial Sequence: Synthetic oligonucleotide"
acucuguaaggaaguuccu

SEQ ID NO: 233 - RNA, 19 nt, Artificial Sequence
  source: /note="Description of Artificial Sequence: Synthetic oligonucleotide"
cucuguaaggaaguucccu

SEQ ID NO: 234 - RNA, 19 nt, Artificial Sequence
  source: /note="Description of Artificial Sequence: Synthetic oligonucleotide"
ucuguaaggaaguucccau

SEQ ID NO: 235 - RNA, 19 nt, Artificial Sequence
  source: /note="Description of Artificial Sequence: Synthetic oligonucleotide"
cuguaaggaaguucccaau

SEQ ID NO: 236 - RNA, 19 nt, Artificial Sequence
  source: /note="Description of Artificial Sequence: Synthetic oligonucleotide"
uguaaggaaguucccaacu

SEQ ID NO: 237 - RNA, 19 nt, Artificial Sequence
  source: /note="Description of Artificial Sequence: Synthetic oligonucleotide"
guaaggaaguucccaacuu

SEQ ID NO: 238 - RNA, 19 nt, Artificial Sequence
  source: /note="Description of Artificial Sequence: Synthetic oligonucleotide"
uaaggaaguucccaacuau

SEQ ID NO: 239 - RNA, 19 nt, Artificial Sequence
  source: /note="Description of Artificial Sequence: Synthetic oligonucleotide"
aaggaaguucccaacuauu

SEQ ID NO: 240 - RNA, 19 nt, Artificial Sequence
  source: /note="Description of Artificial Sequence: Synthetic oligonucleotide"
aggaaguucccaacuauau

SEQ ID NO: 241 - RNA, 19 nt, Artificial Sequence
  source: /note="Description of Artificial Sequence: Synthetic oligonucleotide"
ggaaguucccaacuauaau

SEQ ID NO: 242 - RNA, 19 nt, Artificial Sequence
  source: /note="Description of Artificial Sequence: Synthetic oligonucleotide"
gaaguucccaacuauaaau

SEQ ID NO: 243 - RNA, 19 nt, Artificial Sequence
  source: /note="Description of Artificial Sequence: Synthetic oligonucleotide"
aaguucccaacuauaaacu

SEQ ID NO: 244 - RNA, 19 nt, Artificial Sequence
  source: /note="Description of Artificial Sequence: Synthetic oligonucleotide"
aguucccaacuauaaacuu

SEQ ID NO: 245 - RNA, 19 nt, Artificial Sequence
  source: /note="Description of Artificial Sequence: Synthetic oligonucleotide"
guucccaacuauaaacuuu

SEQ ID NO: 246 - RNA, 19 nt, Artificial Sequence
  source: /note="Description of Artificial Sequence: Synthetic oligonucleotide"
uucccaacuauaaacuuau

SEQ ID NO: 247 - RNA, 19 nt, Artificial Sequence
  source: /note="Description of Artificial Sequence: Synthetic oligonucleotide"
ucccaacuauaaacuuauu

SEQ ID NO: 248 - RNA, 19 nt, Artificial Sequence
  source: /note="Description of Artificial Sequence: Synthetic oligonucleotide"
cccaacuauaaacuuauau

SEQ ID NO: 249 - RNA, 19 nt, Artificial Sequence
  source: /note="Description of Artificial Sequence: Synthetic oligonucleotide"
ccaacuauaaacuuauaau

SEQ ID NO: 250 - RNA, 19 nt, Artificial Sequence
  source: /note="Description of Artificial Sequence: Synthetic oligonucleotide"
caacuauaaacuuauaacu

SEQ ID NO: 251 - RNA, 19 nt, Artificial Sequence
  source: /note="Description of Artificial Sequence: Synthetic oligonucleotide"
aacuauaaacuuauaaccu

SEQ ID NO: 252 - RNA, 19 nt, Artificial Sequence
  source: /note="Description of Artificial Sequence: Synthetic oligonucleotide"
cccagcuguggucucugau

SEQ ID NO: 253 - RNA, 19 nt, Artificial Sequence
  source: /note="Description of Artificial Sequence: Synthetic oligonucleotide"
ccagcuguggucucugagu

SEQ ID NO: 254 - RNA, 19 nt, Artificial Sequence
  source: /note="Description of Artificial Sequence: Synthetic oligonucleotide"
cagcuguggucucugagau

SEQ ID NO: 255 - RNA, 19 nt, Artificial Sequence
  source: /note="Description of Artificial Sequence: Synthetic oligonucleotide"
agcuguggucucugagagu

SEQ ID NO: 256 - RNA, 19 nt, Artificial Sequence
  source: /note="Description of Artificial Sequence: Synthetic oligonucleotide"
gcuguggucucugagagau

SEQ ID NO: 257 - RNA, 19 nt, Artificial Sequence
  source: /note="Description of Artificial Sequence: Synthetic oligonucleotide"
cuguggucucugagagacu

SEQ ID NO: 258 - RNA, 19 nt, Artificial Sequence
  source: /note="Description of Artificial Sequence: Synthetic oligonucleotide"
uguggucucugagagacuu

SEQ ID NO: 259 - RNA, 19 nt, Artificial Sequence
  source: /note="Description of Artificial Sequence: Synthetic oligonucleotide"
guggucucugagagacugu

SEQ ID NO: 260 - RNA, 19 nt, Artificial Sequence
  source: /note="Description of Artificial Sequence: Synthetic oligonucleotide"
uggucucugagagacugau

SEQ ID NO: 261 - RNA, 19 nt, Artificial Sequence
  source: /note="Description of Artificial Sequence: Synthetic oligonucleotide"
ggucucugagagacugaau

SEQ ID NO: 262 - RNA, 19 nt, Artificial Sequence
  source: /note="Description of Artificial Sequence: Synthetic oligonucleotide"
gucucugagagacugaagu

SEQ ID NO: 263 - RNA, 19 nt, Artificial Sequence
  source: /note="Description of Artificial Sequence: Synthetic oligonucleotide"
ucucugagagacugaagau

SEQ ID NO: 264 - RNA, 19 nt, Artificial Sequence
  source: /note="Description of Artificial Sequence: Synthetic oligonucleotide"
cucugagagacugaagauu

SEQ ID NO: 265 - RNA, 19 nt, Artificial Sequence
  source: /note="Description of Artificial Sequence: Synthetic oligonucleotide"
ucugagagacugaagauuu

SEQ ID NO: 266 - RNA, 19 nt, Artificial Sequence
  source: /note="Description of Artificial Sequence: Synthetic oligonucleotide"
cugagagacugaagauucu

SEQ ID NO: 267 - RNA, 19 nt, Artificial Sequence
  source: /note="Description of Artificial Sequence: Synthetic oligonucleotide"
ugagagacugaagauucgu

SEQ ID NO: 268 - RNA, 19 nt, Artificial Sequence
  source: /note="Description of Artificial Sequence: Synthetic oligonucleotide"
gagagacugaagauucgau

SEQ ID NO: 269 - RNA, 19 nt, Artificial Sequence
  source: /note="Description of Artificial Sequence: Synthetic oligonucleotide"
agagacugaagauucgagu

SEQ ID NO: 270 - RNA, 19 nt, Artificial Sequence
  source: /note="Description of Artificial Sequence: Synthetic oligonucleotide"
gagacugaagauucgaggu

SEQ ID NO: 271 - RNA, 19 nt, Artificial Sequence
  source: /note="Description of Artificial Sequence: Synthetic oligonucleotide"
agacugaagauucgaggcu

SEQ ID NO: 272 - RNA, 19 nt, Artificial Sequence
  source: /note="Description of Artificial Sequence: Synthetic oligonucleotide"
gacugaagauucgaggcuu

SEQ ID NO: 273 - RNA, 19 nt, Artificial Sequence
  source: /note="Description of Artificial Sequence: Synthetic oligonucleotide"
acugaagauucgaggcucu

SEQ ID NO: 274 - RNA, 19 nt, Artificial Sequence
  source: /note="Description of Artificial Sequence: Synthetic oligonucleotide"
cugaagauucgaggcuccu

SEQ ID NO: 275 - RNA, 19 nt, Artificial Sequence
  source: /note="Description of Artificial Sequence: Synthetic oligonucleotide"
ugaagauucgaggcucccu

SEQ ID NO: 276 - RNA, 19 nt, Artificial Sequence
  source: /note="Description of Artificial Sequence: Synthetic oligonucleotide"
gaagauucgaggcucccuu

SEQ ID NO: 277 - RNA, 19 nt, Artificial Sequence
  source: /note="Description of Artificial Sequence: Synthetic oligonucleotide"
aagauucgaggcucccugu

SEQ ID NO: 278 - RNA, 19 nt, Artificial Sequence
  source: /note="Description of Artificial Sequence: Synthetic oligonucleotide"
agauucgaggcucccuggu

SEQ ID NO: 279 - RNA, 19 nt, Artificial Sequence
  source: /note="Description of Artificial Sequence: Synthetic oligonucleotide"
gauucgaggcucccuggcu

SEQ ID NO: 280 - RNA, 19 nt, Artificial Sequence
  source: /note="Description of Artificial Sequence: Synthetic oligonucleotide"
auucgaggcucccuggccu

SEQ ID NO: 281 - RNA, 19 nt, Artificial Sequence
  source: /note="Description of Artificial Sequence: Synthetic oligonucleotide"
uucgaggcucccuggccau

SEQ ID NO: 282 - RNA, 19 nt, Artificial Sequence
  source: /note="Description of Artificial Sequence: Synthetic oligonucleotide"
ucgaggcucccuggccagu

SEQ ID NO: 283 - RNA, 19 nt, Artificial Sequence
  source: /note="Description of Artificial Sequence: Synthetic oligonucleotide"
cuggccagggcagcccuuu

SEQ ID NO: 284 - RNA, 19 nt, Artificial Sequence
  source: /note="Description of Artificial Sequence: Synthetic oligonucleotide"
uggccagggcagcccuucu

SEQ ID NO: 285 - RNA, 19 nt, Artificial Sequence
  source: /note="Description of Artificial Sequence: Synthetic oligonucleotide"
ggccagggcagcccuucau

SEQ ID NO: 286 - RNA, 19 nt, Artificial Sequence
  source: /note="Description of Artificial Sequence: Synthetic oligonucleotide"
gccagggcagcccuucagu

SEQ ID NO: 287 - RNA, 19 nt, Artificial Sequence
  source: /note="Description of Artificial Sequence: Synthetic oligonucleotide"
ccagggcagcccuucaggu

SEQ ID NO: 288 - RNA, 19 nt, Artificial Sequence
  source: /note="Description of Artificial Sequence: Synthetic oligonucleotide"
cagggcagcccuucaggau

SEQ ID NO: 289 - RNA, 19 nt, Artificial Sequence
  source: /note="Description of Artificial Sequence: Synthetic oligonucleotide"
agggcagcccuucaggagu

SEQ ID NO: 290 - RNA, 19 nt, Artificial Sequence
  source: /note="Description of Artificial Sequence: Synthetic oligonucleotide"
gggcagcccuucaggagcu

SEQ ID NO: 291 - RNA, 19 nt, Artificial Sequence
  source: /note="Description of Artificial Sequence: Synthetic oligonucleotide"
ggcagcccuucaggagcuu

SEQ ID NO: 292 - RNA, 19 nt, Artificial Sequence
  source: /note="Description of Artificial Sequence: Synthetic oligonucleotide"
gcagcccuucaggagcucu

SEQ ID NO: 293 - RNA, 19 nt, Artificial Sequence
  source: /note="Description of Artificial Sequence: Synthetic oligonucleotide"
cagcccuucaggagcuccu

SEQ ID NO: 294 - RNA, 19 nt, Artificial Sequence
  source: /note="Description of Artificial Sequence: Synthetic oligonucleotide"
agcccuucaggagcuccuu

SEQ ID NO: 295 - RNA, 19 nt, Artificial Sequence
  source: /note="Description of Artificial Sequence: Synthetic oligonucleotide"
gcccuucaggagcuccuuu

SEQ ID NO: 296 - RNA, 19 nt, Artificial Sequence
  source: /note="Description of Artificial Sequence: Synthetic oligonucleotide"
cccuucaggagcuccuuau

SEQ ID NO: 297 - RNA, 19 nt, Artificial Sequence
  source: /note="Description of Artificial Sequence: Synthetic oligonucleotide"
ccuucaggagcuccuuagu

SEQ ID NO: 298 - RNA, 19 nt, Artificial Sequence
  source: /note="Description of Artificial Sequence: Synthetic oligonucleotide"
cuucaggagcuccuuaguu

SEQ ID NO: 299 - RNA, 19 nt, Artificial Sequence
  source: /note="Description of Artificial Sequence: Synthetic oligonucleotide"
uucaggagcuccuuaguau

SEQ ID NO: 300 - RNA, 19 nt, Artificial Sequence
  source: /note="Description of Artificial Sequence: Synthetic oligonucleotide"
ucaggagcuccuuaguaau

SEQ ID NO: 301 - RNA, 19 nt, Artificial Sequence
  source: /note="Description of Artificial Sequence: Synthetic oligonucleotide"
caggagcuccuuaguaaau

SEQ ID NO: 302 - RNA, 19 nt, Artificial Sequence
  source: /note="Description of Artificial Sequence: Synthetic oligonucleotide"
aggagcuccuuaguaaagu

SEQ ID NO: 303 - RNA, 19 nt, Artificial Sequence
  source: /note="Description of Artificial Sequence: Synthetic oligonucleotide"
ggagcuccuuaguaaaggu

SEQ ID NO: 304 - RNA, 19 nt, Artificial Sequence
  source: /note="Description of Artificial Sequence: Synthetic oligonucleotide"
gagcuccuuaguaaaggau

SEQ ID NO: 305 - RNA, 19 nt, Artificial Sequence
  source: /note="Description of Artificial Sequence: Synthetic oligonucleotide"
agcuccuuaguaaaggacu

SEQ ID NO: 306 - RNA, 19 nt, Artificial Sequence
  source: /note="Description of Artificial Sequence: Synthetic oligonucleotide"
gcuccuuaguaaaggacuu

SEQ ID NO: 307 - RNA, 19 nt, Artificial Sequence
  source: /note="Description of Artificial Sequence: Synthetic oligonucleotide"
cuccuuaguaaaggacuuu

SEQ ID NO: 308 - RNA, 19 nt, Artificial Sequence
  source: /note="Description of Artificial Sequence: Synthetic oligonucleotide"
uccuuaguaaaggacuuau

SEQ ID NO: 309 - RNA, 19 nt, Artificial Sequence
  source: /note="Description of Artificial Sequence: Synthetic oligonucleotide"
ccuuaguaaaggacuuauu

SEQ ID NO: 310 - RNA, 19 nt, Artificial Sequence
  source: /note="Description of Artificial Sequence: Synthetic oligonucleotide"
cuuaguaaaggacuuaucu

SEQ ID NO: 311 - RNA, 19 nt, Artificial Sequence
  source: /note="Description of Artificial Sequence: Synthetic oligonucleotide"
uuaguaaaggacuuaucau

SEQ ID NO: 312 - RNA, 19 nt, Artificial Sequence
  source: /note="Description of Artificial Sequence: Synthetic oligonucleotide"
uaguaaaggacuuaucaau

SEQ ID NO: 313 - RNA, 19 nt, Artificial Sequence
  source: /note="Description of Artificial Sequence: Synthetic oligonucleotide"
aguaaaggacuuaucaaau

SEQ ID NO: 314 - RNA, 19 nt, Artificial Sequence
  source: /note="Description of Artificial Sequence: Synthetic oligonucleotide"
guaaaggacuuaucaaacu

SEQ ID NO: 315 - RNA, 19 nt, Artificial Sequence
  source: /note="Description of Artificial Sequence: Synthetic oligonucleotide"
uaaaggacuuaucaaacuu

SEQ ID NO: 316 - RNA, 19 nt, Artificial Sequence
  source: /note="Description of Artificial Sequence: Synthetic oligonucleotide"
aaaggacuuaucaaacugu

SEQ ID NO: 317 - RNA, 19 nt, Artificial Sequence
  source: /note="Description of Artificial Sequence: Synthetic oligonucleotide"
aaggacuuaucaaacuggu

SEQ ID NO: 318 - RNA, 19 nt, Artificial Sequence
  source: /note="Description of Artificial Sequence: Synthetic oligonucleotide"
aggacuuaucaaacugguu

SEQ ID NO: 319 - RNA, 19 nt, Artificial Sequence
  source: /note="Description of Artificial Sequence: Synthetic oligonucleotide"
ggacuuaucaaacugguuu

SEQ ID NO: 320 - RNA, 19 nt, Artificial Sequence
  source: /note="Description of Artificial Sequence: Synthetic oligonucleotide"
gacuuaucaaacugguuuu

SEQ ID NO: 321 - RNA, 19 nt, Artificial Sequence
  source: /note="Description of Artificial Sequence: Synthetic oligonucleotide"
acuuaucaaacugguuucu

SEQ ID NO: 322 - RNA, 19 nt, Artificial Sequence
  source: /note="Description of Artificial Sequence: Synthetic oligonucleotide"
cuuaucaaacugguuucau

SEQ ID NO: 323 - RNA, 19 nt, Artificial Sequence
  source: /note="Description of Artificial Sequence: Synthetic oligonucleotide"
uuaucaaacugguuucaau

SEQ ID NO: 324 - RNA, 19 nt, Artificial Sequence
  source: /note="Description of Artificial Sequence: Synthetic oligonucleotide"
uaucaaacugguuucaaau

SEQ ID NO: 325 - RNA, 19 nt, Artificial Sequence
  source: /note="Description of Artificial Sequence: Synthetic oligonucleotide"
aucaaacugguuucaaagu

SEQ ID NO: 326 - RNA, 19 nt, Artificial Sequence
  source: /note="Description of Artificial Sequence: Synthetic oligonucleotide"
ucaaacugguuucaaagcu

SEQ ID NO: 327 - RNA, 19 nt, Artificial Sequence
  source: /note="Description of Artificial Sequence: Synthetic oligonucleotide"
caaacugguuucaaagcau

SEQ ID NO: 328 - RNA, 19 nt, Artificial Sequence
  source: /note="Description of Artificial Sequence: Synthetic oligonucleotide"
aaacugguuucaaagcacu

SEQ ID NO: 329 - RNA, 19 nt, Artificial Sequence
  source: /note="Description of Artificial Sequence: Synthetic oligonucleotide"
aacugguuucaaagcacau

SEQ ID NO: 330 - RNA, 19 nt, Artificial Sequence
  source: /note="Description of Artificial Sequence: Synthetic oligonucleotide"
acugguuucaaagcacagu

SEQ ID NO: 331 - RNA, 19 nt, Artificial Sequence
  source: /note="Description of Artificial Sequence: Synthetic oligonucleotide"
cugguuucaaagcacagau

SEQ ID NO: 332 - RNA, 19 nt, Artificial Sequence
  source: /note="Description of Artificial Sequence: Synthetic oligonucleotide"
ugguuucaaagcacagagu

SEQ ID NO: 333 - RNA, 19 nt, Artificial Sequence
  source: /note="Description of Artificial Sequence: Synthetic oligonucleotide"
gguuucaaagcacagagcu

SEQ ID NO: 334 - RNA, 19 nt, Artificial Sequence
  source: /note="Description of Artificial Sequence: Synthetic oligonucleotide"
guuucaaagcacagagcuu

SEQ ID NO: 335 - RNA, 19 nt, Artificial Sequence
  source: /note="Description of Artificial Sequence: Synthetic oligonucleotide"
uuucaaagcacagagcucu

SEQ ID NO: 336 - RNA, 19 nt, Artificial Sequence
  source: /note="Description of Artificial Sequence: Synthetic oligonucleotide"
uucaaagcacagagcucau

SEQ ID NO: 337 - RNA, 19 nt, Artificial Sequence
  source: /note="Description of Artificial Sequence: Synthetic oligonucleotide"
ucaaagcacagagcucaau

SEQ ID NO: 338 - RNA, 19 nt, Artificial Sequence
  source: /note="Description of Artificial Sequence: Synthetic oligonucleotide"
caaagcacagagcucaagu

SEQ ID NO: 339 - RNA, 19 nt, Artificial Sequence
  source: /note="Description of Artificial Sequence: Synthetic oligonucleotide"
aaagcacagagcucaaguu

SEQ ID NO: 340 - RNA, 19 nt, Artificial Sequence
  source: /note="Description of Artificial Sequence: Synthetic oligonucleotide"
aagcacagagcucaaguau

SEQ ID NO: 341 - RNA, 19 nt, Artificial Sequence
  source: /note="Description of Artificial Sequence: Synthetic oligonucleotide"
agcacagagcucaaguaau

SEQ ID NO: 342 - RNA, 19 nt, Artificial Sequence
  source: /note="Description of Artificial Sequence: Synthetic oligonucleotide"
gcacagagcucaaguaauu

SEQ ID NO: 343 - RNA, 19 nt, Artificial Sequence
  source: /note="Description of Artificial Sequence: Synthetic oligonucleotide"
cacagagcucaaguaauuu

SEQ ID NO: 344 - RNA, 19 nt, Artificial Sequence
  source: /note="Description of Artificial Sequence: Synthetic oligonucleotide"
acagagcucaaguaauuuu

SEQ ID NO: 345 - RNA, 19 nt, Artificial Sequence
  source: /note="Description of Artificial Sequence: Synthetic oligonucleotide"
cagagcucaaguaauuuau

SEQ ID NO: 346 - RNA, 19 nt, Artificial Sequence
  source: /note="Description of Artificial Sequence: Synthetic oligonucleotide"
agagcucaaguaauuuacu

SEQ ID NO: 347 - RNA, 19 nt, Artificial Sequence
  source: /note="Description of Artificial Sequence: Synthetic oligonucleotide"
gagcucaaguaauuuacau

SEQ ID NO: 348 - RNA, 19 nt, Artificial Sequence
  source: /note="Description of Artificial Sequence: Synthetic oligonucleotide"
agcucaaguaauuuacacu

SEQ ID NO: 349 - RNA, 19 nt, Artificial Sequence
  source: /note="Description of Artificial Sequence: Synthetic oligonucleotide"
gcucaaguaauuuacaccu

SEQ ID NO: 350 - RNA, 19 nt, Artificial Sequence
  source: /note="Description of Artificial Sequence: Synthetic oligonucleotide"
cucaaguaauuuacaccau

SEQ ID NO: 351 - RNA, 19 nt, Artificial Sequence
  source: /note="Description of Artificial Sequence: Synthetic oligonucleotide"
ucaaguaauuuacaccagu

SEQ ID NO: 352 - RNA, 19 nt, Artificial Sequence
  source: /note="Description of Artificial Sequence: Synthetic oligonucleotide"
caaguaauuuacaccagau

SEQ ID NO: 353 - RNA, 19 nt, Artificial Sequence
  source: /note="Description of Artificial Sequence: Synthetic oligonucleotide"
aaguaauuuacaccagaau

SEQ ID NO: 354 - RNA, 19 nt, Artificial Sequence
  source: /note="Description of Artificial Sequence: Synthetic oligonucleotide"
aguaauuuacaccagaaau

SEQ ID NO: 355 - RNA, 19 nt, Artificial Sequence
  source: /note="Description of Artificial Sequence: Synthetic oligonucleotide"
guaauuuacaccagaaauu

SEQ ID NO: 356 - RNA, 19 nt, Artificial Sequence
  source: /note="Description of Artificial Sequence: Synthetic oligonucleotide"
uaauuuacaccagaaauau

SEQ ID NO: 357 - RNA, 19 nt, Artificial Sequence
  source: /note="Description of Artificial Sequence: Synthetic oligonucleotide"
aauuuacaccagaaauacu

SEQ ID NO: 358 - RNA, 19 nt, Artificial Sequence
  source: /note="Description of Artificial Sequence: Synthetic oligonucleotide"
auuuacaccagaaauaccu

SEQ ID NO: 359 - RNA, 19 nt, Artificial Sequence
  source: /note="Description of Artificial Sequence: Synthetic oligonucleotide"
uuuacaccagaaauaccau

SEQ ID NO: 360 - RNA, 19 nt, Artificial Sequence
  source: /note="Description of Artificial Sequence: Synthetic oligonucleotide"
uuacaccagaaauaccaau

SEQ ID NO: 361 - RNA, 19 nt, Artificial Sequence
  source: /note="Description of Artificial Sequence: Synthetic oligonucleotide"
uacaccagaaauaccaagu

SEQ ID NO: 362 - RNA, 19 nt, Artificial Sequence
  source: /note="Description of Artificial Sequence: Synthetic oligonucleotide"
acaccagaaauaccaaggu

SEQ ID NO: 363 - RNA, 19 nt, Artificial Sequence
  source: /note="Description of Artificial Sequence: Synthetic oligonucleotide"
caccagaaauaccaagggu

SEQ ID NO: 364 - RNA, 19 nt, Artificial Sequence
  source: /note="Description of Artificial Sequence: Synthetic oligonucleotide"
accagaaauaccaaggguu

SEQ ID NO: 365 - RNA, 19 nt, Artificial Sequence
  source: /note="Description of Artificial Sequence: Synthetic oligonucleotide"
ccagaaauaccaagggugu

SEQ ID NO: 366 - RNA, 19 nt, Artificial Sequence
  source: /note="Description of Artificial Sequence: Synthetic oligonucleotide"
cagaaauaccaaggguggu

SEQ ID NO: 367 - RNA, 19 nt, Artificial Sequence
  source: /note="Description of Artificial Sequence: Synthetic oligonucleotide"
agaaauaccaaggguggau

SEQ ID NO: 368 - RNA, 19 nt, Artificial Sequence
  source: /note="Description of Artificial Sequence: Synthetic oligonucleotide"
gaaauaccaaggguggagu

SEQ ID NO: 369 - RNA, 19 nt, Artificial Sequence
  source: /note="Description of Artificial Sequence: Synthetic oligonucleotide"
aaauaccaaggguggagau

SEQ ID NO: 370 - RNA, 19 nt, Artificial Sequence
  source: /note="Description of Artificial Sequence: Synthetic oligonucleotide"
aauaccaaggguggagauu

SEQ ID NO: 371 - RNA, 19 nt, Artificial Sequence
  source: /note="Description of Artificial Sequence: Synthetic oligonucleotide"
auaccaaggguggagaugu

SEQ ID NO: 372 - RNA, 19 nt, Artificial Sequence
  source: /note="Description of Artificial Sequence: Synthetic oligonucleotide"
uaccaaggguggagaugcu

SEQ ID NO: 373 - RNA, 19 nt, Artificial Sequence
  source: /note="Description of Artificial Sequence: Synthetic oligonucleotide"
accaaggguggagaugcuu

SEQ ID NO: 374 - RNA, 19 nt, Artificial Sequence
  source: /note="Description of Artificial Sequence: Synthetic oligonucleotide"
ccaaggguggagaugcucu

SEQ ID NO: 375 - RNA, 19 nt, Artificial Sequence
  source: /note="Description of Artificial Sequence: Synthetic oligonucleotide"
caaggguggagaugcuccu

SEQ ID NO: 376 - RNA, 19 nt, Artificial Sequence
  source: /note="Description of Artificial Sequence: Synthetic oligonucleotide"
aaggguggagaugcuccau

SEQ ID NO: 377 - RNA, 19 nt, Artificial Sequence
  source: /note="Description of Artificial Sequence: Synthetic oligonucleotide"
aggguggagaugcuccagu

SEQ ID NO: 378 - RNA, 19 nt, Artificial Sequence
  source: /note="Description of Artificial Sequence: Synthetic oligonucleotide"
ggguggagaugcuccagcu

SEQ ID NO: 379 - RNA, 19 nt, Artificial Sequence
  source: /note="Description of Artificial Sequence: Synthetic oligonucleotide"
gguggagaugcuccagcuu

SEQ ID NO: 380 - RNA, 19 nt, Artificial Sequence
  source: /note="Description of Artificial Sequence: Synthetic oligonucleotide"
guggagaugcuccagcugu

SEQ ID NO: 381 - RNA, 19 nt, Artificial Sequence
  source: /note="Description of Artificial Sequence: Synthetic oligonucleotide"
uggagaugcuccagcugcu

SEQ ID NO: 382 - RNA, 19 nt, Artificial Sequence
  source: /note="Description of Artificial Sequence: Synthetic oligonucleotide"
ggagaugcuccagcugcuu

SEQ ID NO: 383 - RNA, 19 nt, Artificial Sequence
  source: /note="Description of Artificial Sequence: Synthetic oligonucleotide"
gagaugcuccagcugcugu

SEQ ID NO: 384 - RNA, 19 nt, Artificial Sequence
  source: /note="Description of Artificial Sequence: Synthetic oligonucleotide"
agaugcuccagcugcuggu

SEQ ID NO: 385 - RNA, 19 nt, Artificial Sequence
  source: /note="Description of Artificial Sequence: Synthetic oligonucleotide"
gaugcuccagcugcugguu

SEQ ID NO: 386 - RNA, 19 nt, Artificial Sequence
  source: /note="Description of Artificial Sequence: Synthetic oligonucleotide"
augcuccagcugcuggugu

SEQ ID NO: 387 - RNA, 19 nt, Artificial Sequence
  source: /note="Description of Artificial Sequence: Synthetic oligonucleotide"
ugcuccagcugcuggugau

SEQ ID NO: 388 - RNA, 19 nt, Artificial Sequence
  source: /note="Description of Artificial Sequence: Synthetic oligonucleotide"
gcuccagcugcuggugaau

SEQ ID NO: 389 - RNA, 19 nt, Artificial Sequence
  source: /note="Description of Artificial Sequence: Synthetic oligonucleotide"
cuccagcugcuggugaagu

SEQ ID NO: 390 - RNA, 19 nt, Artificial Sequence
  source: /note="Description of Artificial Sequence: Synthetic oligonucleotide"
uccagcugcuggugaagau

SEQ ID NO: 391 - RNA, 19 nt, Artificial Sequence
  source: /note="Description of Artificial Sequence: Synthetic oligonucleotide"
ccagcugcuggugaagauu

SEQ ID NO: 392 - RNA, 19 nt, Artificial Sequence
  source: /note="Description of Artificial Sequence: Synthetic oligonucleotide"
cagcugcuggugaagaugu

SEQ ID NO: 393 - RNA, 19 nt, Artificial Sequence
  source: /note="Description of Artificial Sequence: Synthetic oligonucleotide"
agcugcuggugaagaugcu

SEQ ID NO: 394 - RNA, 19 nt, Artificial Sequence
  source: /note="Description of Artificial Sequence: Synthetic oligonucleotide"
gcugcuggugaagaugcau

SEQ ID NO: 395 - RNA, 19 nt, Artificial Sequence
  source: /note="Description of Artificial Sequence: Synthetic oligonucleotide"
cugcuggugaagaugcauu

SEQ ID NO: 396 - RNA, 19 nt, Artificial Sequence
  source: /note="Description of Artificial Sequence: Synthetic oligonucleotide"
ugcuggugaagaugcaugu

SEQ ID NO: 397 - RNA, 19 nt, Artificial Sequence
  source: /note="Description of Artificial Sequence: Synthetic oligonucleotide"
gcuggugaagaugcaugau

SEQ ID NO: 398 - RNA, 19 nt, Artificial Sequence
  source: /note="Description of Artificial Sequence: Synthetic oligonucleotide"
cuggugaagaugcaugaau

SEQ ID NO: 399 - RNA, 19 nt, Artificial Sequence
  source: /note="Description of Artificial Sequence: Synthetic oligonucleotide"
uggugaagaugcaugaauu

SEQ ID NO: 400 - RNA, 19 nt, Artificial Sequence
  source: /note="Description of Artificial Sequence: Synthetic oligonucleotide"
ggugaagaugcaugaauau

SEQ ID NO: 401 - RNA, 19 nt, Artificial Sequence
  source: /note="Description of Artificial Sequence: Synthetic oligonucleotide"
gugaagaugcaugaauagu

SEQ ID NO: 402 - RNA, 19 nt, Artificial Sequence
  source: /note="Description of Artificial Sequence: Synthetic oligonucleotide"
ugaagaugcaugaauaggu

SEQ ID NO: 403 - RNA, 19 nt, Artificial Sequence
  source: /note="Description of Artificial Sequence: Synthetic oligonucleotide"
gaagaugcaugaauagguu

SEQ ID NO: 404 - RNA, 19 nt, Artificial Sequence
  source: /note="Description of Artificial Sequence: Synthetic oligonucleotide"
aagaugcaugaauaggucu

SEQ ID NO: 405 - RNA, 19 nt, Artificial Sequence
  source: /note="Description of Artificial Sequence: Synthetic oligonucleotide"
agaugcaugaauagguccu

SEQ ID NO: 406 - RNA, 19 nt, Artificial Sequence
  source: /note="Description of Artificial Sequence: Synthetic oligonucleotide"
gaugcaugaauagguccau

SEQ ID NO: 407 - RNA, 19 nt, Artificial Sequence
  source: /note="Description of Artificial Sequence: Synthetic oligonucleotide"
augcaugaauagguccaau

SEQ ID NO: 408 - RNA, 19 nt, Artificial Sequence
  source: /note="Description of Artificial Sequence: Synthetic oligonucleotide"
ugcaugaauagguccaacu

SEQ ID NO: 409 - RNA, 19 nt, Artificial Sequence
  source: /note="Description of Artificial Sequence: Synthetic oligonucleotide"
gcaugaauagguccaaccu

SEQ ID NO: 410 - RNA, 19 nt, Artificial Sequence
  source: /note="Description of Artificial Sequence: Synthetic oligonucleotide"
caugaauagguccaaccau

SEQ ID NO: 411 - RNA, 19 nt, Artificial Sequence
  source: /note="Description of Artificial Sequence: Synthetic oligonucleotide"
augaauagguccaaccagu

SEQ ID NO: 412 - RNA, 19 nt, Artificial Sequence
  source: /note="Description of Artificial Sequence: Synthetic oligonucleotide"
ugaauagguccaaccagcu

SEQ ID NO: 413 - RNA, 19 nt, Artificial Sequence
  source: /note="Description of Artificial Sequence: Synthetic oligonucleotide"
gaauagguccaaccagcuu

SEQ ID NO: 414 - RNA, 19 nt, Artificial Sequence
  source: /note="Description of Artificial Sequence: Synthetic oligonucleotide"
aauagguccaaccagcugu

SEQ ID NO: 415 - RNA, 19 nt, Artificial Sequence
  source: /note="Description of Artificial Sequence: Synthetic oligonucleotide"
auagguccaaccagcuguu

SEQ ID NO: 416 - RNA, 19 nt, Artificial Sequence
  source: /note="Description of Artificial Sequence: Synthetic oligonucleotide"
uagguccaaccagcuguau

SEQ ID NO: 417 - RNA, 19 nt, Artificial Sequence
  source: /note="Description of Artificial Sequence: Synthetic oligonucleotide"
agguccaaccagcuguacu

SEQ ID NO: 418 - RNA, 19 nt, Artificial Sequence
  source: /note="Description of Artificial Sequence: Synthetic oligonucleotide"
gguccaaccagcuguacau

SEQ ID NO: 419 - RNA, 19 nt, Artificial Sequence
  source: /note="Description of Artificial Sequence: Synthetic oligonucleotide"
guccaaccagcuguacauu

SEQ ID NO: 420 - RNA, 19 nt, Artificial Sequence
  source: /note="Description of Artificial Sequence: Synthetic oligonucleotide"
uccaaccagcuguacauuu

SEQ ID NO: 421 - RNA, 19 nt, Artificial Sequence
  source: /note="Description of Artificial Sequence: Synthetic oligonucleotide"
ccaaccagcuguacauuuu

SEQ ID NO: 422 - RNA, 19 nt, Artificial Sequence
  source: /note="Description of Artificial Sequence: Synthetic oligonucleotide"
caaccagcuguacauuugu

SEQ ID NO: 423 - RNA, 19 nt, Artificial Sequence
  source: /note="Description of Artificial Sequence: Synthetic oligonucleotide"
aaccagcuguacauuuggu

SEQ ID NO: 424 - RNA, 19 nt, Artificial Sequence
  source: /note="Description of Artificial Sequence: Synthetic oligonucleotide"
accagcuguacauuuggau

SEQ ID NO: 425 - RNA, 19 nt, Artificial Sequence
  source: /note="Description of Artificial Sequence: Synthetic oligonucleotide"
ccagcuguacauuuggaau

SEQ ID NO: 426 - RNA, 19 nt, Artificial Sequence
  source: /note="Description of Artificial Sequence: Synthetic oligonucleotide"
cagcuguacauuuggaaau

SEQ ID NO: 427 - RNA, 19 nt, Artificial Sequence
  source: /note="Description of Artificial Sequence: Synthetic oligonucleotide"
agcuguacauuuggaaaau

SEQ ID NO: 428 - RNA, 19 nt, Artificial Sequence
  source: /note="Description of Artificial Sequence: Synthetic oligonucleotide"
gcuguacauuuggaaaaau

SEQ ID NO: 429 - RNA, 19 nt, Artificial Sequence
  source: /note="Description of Artificial Sequence: Synthetic oligonucleotide"
cuguacauuuggaaaaauu

SEQ ID NO: 430 - RNA, 19 nt, Artificial Sequence
  source: /note="Description of Artificial Sequence: Synthetic oligonucleotide"
uguacauuuggaaaaauau

SEQ ID NO: 431 - RNA, 19 nt, Artificial Sequence
  source: /note="Description of Artificial Sequence: Synthetic oligonucleotide"
guacauuuggaaaaauaau

SEQ ID NO: 432 - RNA, 19 nt, Artificial Sequence
  source: /note="Description of Artificial Sequence: Synthetic oligonucleotide"
cauuuggaaaaauaaaacu

SEQ ID NO: 433 - RNA, 19 nt, Artificial Sequence
  source: /note="Description of Artificial Sequence: Synthetic oligonucleotide"
aaagaugucggacaaaaag

SEQ ID NO: 434 - RNA, 19 nt, Artificial Sequence
  source: /note="Description of Artificial Sequence: Synthetic oligonucleotide"
acaagaugucggacaaaaa

SEQ ID NO: 435 - RNA, 19 nt, Artificial Sequence
  source: /note="Description of Artificial Sequence: Synthetic oligonucleotide"
aucaagaugucggacaaaa

SEQ ID NO: 436 - RNA, 19 nt, Artificial Sequence
  source: /note="Description of Artificial Sequence: Synthetic oligonucleotide"
agucaagaugucggacaaa

SEQ ID NO: 437 - RNA, 19 nt, Artificial Sequence
  source: /note="Description of Artificial Sequence: Synthetic oligonucleotide"
acgucaagaugucggacaa

SEQ ID NO: 438 - RNA, 19 nt, Artificial Sequence
  source: /note="Description of Artificial Sequence: Synthetic oligonucleotide"
aucgucaagaugucggaca

SEQ ID NO: 439 - RNA, 19 nt, Artificial Sequence
  source: /note="Description of Artificial Sequence: Synthetic oligonucleotide"
acucgucaagaugucggac

SEQ ID NO: 440 - RNA, 19 nt, Artificial Sequence
  source: /note="Description of Artificial Sequence: Synthetic oligonucleotide"
accucgucaagaugucgga

SEQ ID NO: 441 - RNA, 19 nt, Artificial Sequence
  source: /note="Description of Artificial Sequence: Synthetic oligonucleotide"
agccucgucaagaugucgg

SEQ ID NO: 442 - RNA, 19 nt, Artificial Sequence
  source: /note="Description of Artificial Sequence: Synthetic oligonucleotide"
aagccucgucaagaugucg

SEQ ID NO: 443 - RNA, 19 nt, Artificial Sequence
  source: /note="Description of Artificial Sequence: Synthetic oligonucleotide"
acagccucgucaagauguc

SEQ ID NO: 444 - RNA, 19 nt, Artificial Sequence
  source: /note="Description of Artificial Sequence: Synthetic oligonucleotide"
agcagccucgucaagaugu

SEQ ID NO: 445 - RNA, 19 nt, Artificial Sequence
  source: /note="Description of Artificial Sequence: Synthetic oligonucleotide"
acgcagccucgucaagaug

SEQ ID NO: 446 - RNA, 19 nt, Artificial Sequence
  source: /note="Description of Artificial Sequence: Synthetic oligonucleotide"
accgcagccucgucaagau

SEQ ID NO: 447 - RNA, 19 nt, Artificial Sequence
  source: /note="Description of Artificial Sequence: Synthetic oligonucleotide"
aaccgcagccucgucaaga

SEQ ID NO: 448 - RNA, 19 nt, Artificial Sequence
  source: /note="Description of Artificial Sequence: Synthetic oligonucleotide"
acaccgcagccucgucaag

SEQ ID NO: 449 - RNA, 19 nt, Artificial Sequence
  source: /note="Description of Artificial Sequence: Synthetic oligonucleotide"
aacaccgcagccucgucaa

SEQ ID NO: 450 - RNA, 19 nt, Artificial Sequence
  source: /note="Description of Artificial Sequence: Synthetic oligonucleotide"
agacaccgcagccucguca

SEQ ID NO: 451 - RNA, 19 nt, Artificial Sequence
  source: /note="Description of Artificial Sequence: Synthetic oligonucleotide"
aagacaccgcagccucguc

SEQ ID NO: 452 - RNA, 19 nt, Artificial Sequence
  source: /note="Description of Artificial Sequence: Synthetic oligonucleotide"
acagacaccgcagccucgu

SEQ ID NO: 453 - RNA, 19 nt, Artificial Sequence
  source: /note="Description of Artificial Sequence: Synthetic oligonucleotide"
agcagacaccgcagccucg

SEQ ID NO: 454 - RNA, 19 nt, Artificial Sequence
  source: /note="Description of Artificial Sequence: Synthetic oligonucleotide"
aagcagacaccgcagccuc

SEQ ID NO: 455 - RNA, 19 nt, Artificial Sequence
  source: /note="Description of Artificial Sequence: Synthetic oligonucleotide"
acagcagacaccgcagccu

SEQ ID NO: 456 - DNA, 19 bp, Artificial Sequence
  source: /note="Description of Artificial Sequence: Synthetic oligonucleotide"
agcagcagacaccgcagcc

SEQ ID NO: 457 - DNA, 19 bp, Artificial Sequence
  source: /note="Description of Artificial Sequence: Synthetic oligonucleotide"
aagcagcagacaccgcagc

SEQ ID NO: 458 - RNA, 19 nt, Artificial Sequence
  source: /note="Description of Artificial Sequence: Synthetic oligonucleotide"
auagcagcagacaccgcag

SEQ ID NO: 459 - RNA, 19 nt, Artificial Sequence
  source: /note="Description of Artificial Sequence: Synthetic oligonucleotide"
aauagcagcagacaccgca

SEQ ID NO: 460 - RNA, 19 nt, Artificial Sequence
  source: /note="Description of Artificial Sequence: Synthetic oligonucleotide"
aaauagcagcagacaccgc

SEQ ID NO: 461 - RNA, 19 nt, Artificial Sequence
  source: /note="Description of Artificial Sequence: Synthetic oligonucleotide"
agaauagcagcagacaccg

SEQ ID NO: 462 - RNA, 19 nt, Artificial Sequence
  source: /note="Description of Artificial Sequence: Synthetic oligonucleotide"
aagaauagcagcagacacc

SEQ ID NO: 463 - RNA, 19 nt, Artificial Sequence
  source: /note="Description of Artificial Sequence: Synthetic oligonucleotide"
agagaauagcagcagacac

SEQ ID NO: 464 - RNA, 19 nt, Artificial Sequence
  source: /note="Description of Artificial Sequence: Synthetic oligonucleotide"
aggagaauagcagcagaca

SEQ ID NO: 465 - RNA, 19 nt, Artificial Sequence
  source: /note="Description of Artificial Sequence: Synthetic oligonucleotide"
acggagaauagcagcagac

SEQ ID NO: 466 - RNA, 19 nt, Artificial Sequence
  source: /note="Description of Artificial Sequence: Synthetic oligonucleotide"
aucggagaauagcagcaga

SEQ ID NO: 467 - RNA, 19 nt, Artificial Sequence
  source: /note="Description of Artificial Sequence: Synthetic oligonucleotide"
acucggagaauagcagcag

SEQ ID NO: 468 - RNA, 19 nt, Artificial Sequence
  source: /note="Description of Artificial Sequence: Synthetic oligonucleotide"
agcucggagaauagcagca

SEQ ID NO: 469 - RNA, 19 nt, Artificial Sequence
  source: /note="Description of Artificial Sequence: Synthetic oligonucleotide"
aagcucggagaauagcagc

SEQ ID NO: 470 - RNA, 19 nt, Artificial Sequence
  source: /note="Description of Artificial Sequence: Synthetic oligonucleotide"
aaagcucggagaauagcag

SEQ ID NO: 471 - RNA, 19 nt, Artificial Sequence
  source: /note="Description of Artificial Sequence: Synthetic oligonucleotide"
agaagcucggagaauagca

SEQ ID NO: 472 - RNA, 19 nt, Artificial Sequence
  source: /note="Description of Artificial Sequence: Synthetic oligonucleotide"
acgaagcucggagaauagc

SEQ ID NO: 473 - RNA, 19 nt, Artificial Sequence
  source: /note="Description of Artificial Sequence: Synthetic oligonucleotide"
agcgaagcucggagaauag

SEQ ID NO: 474 - RNA, 19 nt, Artificial Sequence
  source: /note="Description of Artificial Sequence: Synthetic oligonucleotide"
augcgaagcucggagaaua

SEQ ID NO: 475 - RNA, 19 nt, Artificial Sequence
  source: /note="Description of Artificial Sequence: Synthetic oligonucleotide"
auugcgaagcucggagaau

SEQ ID NO: 476 - RNA, 19 nt, Artificial Sequence
  source: /note="Description of Artificial Sequence: Synthetic oligonucleotide"
aauugcgaagcucggagaa

SEQ ID NO: 477 - RNA, 19 nt, Artificial Sequence
  source: /note="Description of Artificial Sequence: Synthetic oligonucleotide"
acauugcgaagcucggaga

SEQ ID NO: 478 - RNA, 19 nt, Artificial Sequence
  source: /note="Description of Artificial Sequence: Synthetic oligonucleotide"
agcauugcgaagcucggag

SEQ ID NO: 479 - RNA, 19 nt, Artificial Sequence
  source: /note="Description of Artificial Sequence: Synthetic oligonucleotide"
aggcauugcgaagcucgga

SEQ ID NO: 480 - RNA, 19 nt, Artificial Sequence
  source: /note="Description of Artificial Sequence: Synthetic oligonucleotide"
acggcauugcgaagcucgg

SEQ ID NO: 481 - RNA, 19 nt, Artificial Sequence
  source: /note="Description of Artificial Sequence: Synthetic oligonucleotide"
agcggcauugcgaagcucg

SEQ ID NO: 482 - RNA, 19 nt, Artificial Sequence
  source: /note="Description of Artificial Sequence: Synthetic oligonucleotide"
aggcggcauugcgaagcuc

SEQ ID NO: 483 - RNA, 19 nt, Artificial Sequence
  source: /note="Description of Artificial Sequence: Synthetic oligonucleotide"
aaggcggcauugcgaagcu

SEQ ID NO: 484 - RNA, 19 nt, Artificial Sequence
  source: /note="Description of Artificial Sequence: Synthetic oligonucleotide"
auaggcggcauugcgaagc

SEQ ID NO: 485 - RNA, 19 nt, Artificial Sequence
  source: /note="Description of Artificial Sequence: Synthetic oligonucleotide"
auuaggcggcauugcgaag

SEQ ID NO: 486 - RNA, 19 nt, Artificial Sequence
  source: /note="Description of Artificial Sequence: Synthetic oligonucleotide"
acuuaggcggcauugcgaa

SEQ ID NO: 487 - RNA, 19 nt, Artificial Sequence
  source: /note="Description of Artificial Sequence: Synthetic oligonucleotide"
accuuaggcggcauugcga

SEQ ID NO: 488 - RNA, 19 nt, Artificial Sequence
  source: /note="Description of Artificial Sequence: Synthetic oligonucleotide"
auccuuaggcggcauugcg

SEQ ID NO: 489 - RNA, 19 nt, Artificial Sequence
  source: /note="Description of Artificial Sequence: Synthetic oligonucleotide"
aguccuuaggcggcauugc

SEQ ID NO: 490 - RNA, 19 nt, Artificial Sequence
  source: /note="Description of Artificial Sequence: Synthetic oligonucleotide"
acguccuuaggcggcauug

SEQ ID NO: 491 - RNA, 19 nt, Artificial Sequence
  source: /note="Description of Artificial Sequence: Synthetic oligonucleotide"
aucguccuuaggcggcauu

SEQ ID NO: 492 - RNA, 19 nt, Artificial Sequence
  source: /note="Description of Artificial Sequence: Synthetic oligonucleotide"
agucguccuuaggcggcau

SEQ ID NO: 493 - RNA, 19 nt, Artificial Sequence
  source: /note="Description of Artificial Sequence: Synthetic oligonucleotide"
augucguccuuaggcggca

SEQ ID NO: 494 - RNA, 19 nt, Artificial Sequence
  source: /note="Description of Artificial Sequence: Synthetic oligonucleotide"
auugucguccuuaggcggc

SEQ ID NO: 495 - RNA, 19 nt, Artificial Sequence
  source: /note="Description of Artificial Sequence: Synthetic oligonucleotide"
acuugucguccuuaggcgg

SEQ ID NO: 496 - RNA, 19 nt, Artificial Sequence
  source: /note="Description of Artificial Sequence: Synthetic oligonucleotide"
aucuugucguccuuaggcg

SEQ ID NO: 497 - RNA, 19 nt, Artificial Sequence
  source: /note="Description of Artificial Sequence: Synthetic oligonucleotide"
auucuugucguccuuaggc

SEQ ID NO: 498 - RNA, 19 nt, Artificial Sequence
  source: /note="Description of Artificial Sequence: Synthetic oligonucleotide"
acuucuugucguccuuagg

SEQ ID NO: 499 - RNA, 19 nt, Artificial Sequence
  source: /note="Description of Artificial Sequence: Synthetic oligonucleotide"
aucuucuugucguccuuag

SEQ ID NO: 500 - RNA, 19 nt, Artificial Sequence
  source: /note="Description of Artificial Sequence: Synthetic oligonucleotide"
auucuucuugucguccuua

SEQ ID NO: 501 - RNA, 19 nt, Artificial Sequence
  source: /note="Description of Artificial Sequence: Synthetic oligonucleotide"
acuucuucuugucguccuu

SEQ ID NO: 502 - RNA, 19 nt, Artificial Sequence
  source: /note="Description of Artificial Sequence: Synthetic oligonucleotide"
aucuucuucuugucguccu

SEQ ID NO: 503 - RNA, 19 nt, Artificial Sequence
  source: /note="Description of Artificial Sequence: Synthetic oligonucleotide"
auucuucuucuugucgucc

SEQ ID NO: 504 - RNA, 19 nt, Artificial Sequence
  source: /note="Description of Artificial Sequence: Synthetic oligonucleotide"
acuucuucuucuugucguc

SEQ ID NO: 505 - RNA, 19 nt, Artificial Sequence
  source: /note="Description of Artificial Sequence: Synthetic oligonucleotide"
accuucuucuucuugucgu

SEQ ID NO: 506 - RNA, 19 nt, Artificial Sequence
  source: /note="Description of Artificial Sequence: Synthetic oligonucleotide"
auccuucuucuucuugucg

SEQ ID NO: 507 - RNA, 19 nt, Artificial Sequence
  source: /note="Description of Artificial Sequence: Synthetic oligonucleotide"
aguccuucuucuucuuguc

SEQ ID NO: 508 - RNA, 19 nt, Artificial Sequence
  source: /note="Description of Artificial Sequence: Synthetic oligonucleotide"
acguccuucuucuucuugu

SEQ ID NO: 509 - RNA, 19 nt, Artificial Sequence
  source: /note="Description of Artificial Sequence: Synthetic oligonucleotide"
agcguccuucuucuucuug

SEQ ID NO: 510 - RNA, 19 nt, Artificial Sequence
  source: /note="Description of Artificial Sequence: Synthetic oligonucleotide"
aagcguccuucuucuucuu

SEQ ID NO: 511 - RNA, 19 nt, Artificial Sequence
  source: /note="Description of Artificial Sequence: Synthetic oligonucleotide"
acagcguccuucuucuucu

SEQ ID NO: 512 - RNA, 19 nt, Artificial Sequence
  source: /note="Description of Artificial Sequence: Synthetic oligonucleotide"
accagcguccuucuucuuc

SEQ ID NO: 513 - RNA, 19 nt, Artificial Sequence
  source: /note="Description of Artificial Sequence: Synthetic oligonucleotide"
auccagcguccuucuucuu

SEQ ID NO: 514 - RNA, 19 nt, Artificial Sequence
  source: /note="Description of Artificial Sequence: Synthetic oligonucleotide"
auuccagcguccuucuucu

SEQ ID NO: 515 - RNA, 19 nt, Artificial Sequence
  source: /note="Description of Artificial Sequence: Synthetic oligonucleotide"
auuuccagcguccuucuuc

SEQ ID NO: 516 - RNA, 19 nt, Artificial Sequence
  source: /note="Description of Artificial Sequence: Synthetic oligonucleotide"
acuuuccagcguccuucuu

SEQ ID NO: 517 - RNA, 19 nt, Artificial Sequence
  source: /note="Description of Artificial Sequence: Synthetic oligonucleotide"
aacuuuccagcguccuucu

SEQ ID NO: 518 - RNA, 19 nt, Artificial Sequence
  source: /note="Description of Artificial Sequence: Synthetic oligonucleotide"
agacuuuccagcguccuuc

SEQ ID NO: 519 - RNA, 19 nt, Artificial Sequence
  source: /note="Description of Artificial Sequence: Synthetic oligonucleotide"
acgacuuuccagcguccuu

SEQ ID NO: 520 - RNA, 19 nt, Artificial Sequence
  source: /note="Description of Artificial Sequence: Synthetic oligonucleotide"
accgacuuuccagcguccu

SEQ ID NO: 521 - RNA, 19 nt, Artificial Sequence
  source: /note="Description of Artificial Sequence: Synthetic oligonucleotide"
agccgacuuuccagcgucc

SEQ ID NO: 522 - RNA, 19 nt, Artificial Sequence
  source: /note="Description of Artificial Sequence: Synthetic oligonucleotide"
aggccgacuuuccagcguc

SEQ ID NO: 523 - RNA, 19 nt, Artificial Sequence
  source: /note="Description of Artificial Sequence: Synthetic oligonucleotide"
auggccgacuuuccagcgu

SEQ ID NO: 524 - RNA, 19 nt, Artificial Sequence
  source: /note="Description of Artificial Sequence: Synthetic oligonucleotide"
auuggccgacuuuccagcg

SEQ ID NO: 525 - RNA, 19 nt, Artificial Sequence
  source: /note="Description of Artificial Sequence: Synthetic oligonucleotide"
acuuggccgacuuuccagc

SEQ ID NO: 526 - RNA, 19 nt, Artificial Sequence
  source: /note="Description of Artificial Sequence: Synthetic oligonucleotide"
aucuuggccgacuuuccag

SEQ ID NO: 527 - RNA, 19 nt, Artificial Sequence
  source: /note="Description of Artificial Sequence: Synthetic oligonucleotide"
auucuuggccgacuuucca

SEQ ID NO: 528 - RNA, 19 nt, Artificial Sequence
  source: /note="Description of Artificial Sequence: Synthetic oligonucleotide"
auuucuuggccgacuuucc

SEQ ID NO: 529 - RNA, 19 nt, Artificial Sequence
  source: /note="Description of Artificial Sequence: Synthetic oligonucleotide"
acuuucuuggccgacuuuc

SEQ ID NO: 530 - RNA, 19 nt, Artificial Sequence
  source: /note="Description of Artificial Sequence: Synthetic oligonucleotide"
aucuuucuuggccgacuuu

SEQ ID NO: 531 - RNA, 19 nt, Artificial Sequence
  source: /note="Description of Artificial Sequence: Synthetic oligonucleotide"
agucuuucuuggccgacuu

SEQ ID NO: 532 - RNA, 19 nt, Artificial Sequence
  source: /note="Description of Artificial Sequence: Synthetic oligonucleotide"
augucuuucuuggccgacu

SEQ ID NO: 533 - RNA, 19 nt, Artificial Sequence
  source: /note="Description of Artificial Sequence: Synthetic oligonucleotide"
auugucuuucuuggccgac

SEQ ID NO: 534 - RNA, 19 nt, Artificial Sequence
  source: /note="Description of Artificial Sequence: Synthetic oligonucleotide"
auuugucuuucuuggccga

SEQ ID NO: 535 - RNA, 19 nt, Artificial Sequence
  source: /note="Description of Artificial Sequence: Synthetic oligonucleotide"
acuuugucuuucuuggccg

SEQ ID NO: 536 - RNA, 19 nt, Artificial Sequence
  source: /note="Description of Artificial Sequence: Synthetic oligonucleotide"
aucuuugucuuucuuggcc

SEQ ID NO: 537 - RNA, 19 nt, Artificial Sequence
  source: /note="Description of Artificial Sequence: Synthetic oligonucleotide"
agucuuugucuuucuuggc

SEQ ID NO: 538 - RNA, 19 nt, Artificial Sequence
  source: /note="Description of Artificial Sequence: Synthetic oligonucleotide"
aggucuuugucuuucuugg

SEQ ID NO: 539 - RNA, 19 nt, Artificial Sequence
  source: /note="Description of Artificial Sequence: Synthetic oligonucleotide"
agggucuuugucuuucuug

SEQ ID NO: 540 - RNA, 19 nt, Artificial Sequence
  source: /note="Description of Artificial Sequence: Synthetic oligonucleotide"
acugggucuuugucuuucu

SEQ ID NO: 541 - RNA, 19 nt, Artificial Sequence
  source: /note="Description of Artificial Sequence: Synthetic oligonucleotide"
aacugggucuuugucuuuc

SEQ ID NO: 542 - RNA, 19 nt, Artificial Sequence
  source: /note="Description of Artificial Sequence: Synthetic oligonucleotide"
acacugggucuuugucuuu

SEQ ID NO: 543 - RNA, 19 nt, Artificial Sequence
  source: /note="Description of Artificial Sequence: Synthetic oligonucleotide"
aucacugggucuuugucuu

SEQ ID NO: 544 - RNA, 19 nt, Artificial Sequence
  source: /note="Description of Artificial Sequence: Synthetic oligonucleotide"
auucacugggucuuugucu

SEQ ID NO: 545 - RNA, 19 nt, Artificial Sequence
  source: /note="Description of Artificial Sequence: Synthetic oligonucleotide"
aguucacugggucuuuguc

SEQ ID NO: 546 - RNA, 19 nt, Artificial Sequence
  source: /note="Description of Artificial Sequence: Synthetic oligonucleotide"
auguucacugggucuuugu

SEQ ID NO: 547 - RNA, 19 nt, Artificial Sequence
  source: /note="Description of Artificial Sequence: Synthetic oligonucleotide"
auuguucacugggucuuug

SEQ ID NO: 548 - RNA, 19 nt, Artificial Sequence
  source: /note="Description of Artificial Sequence: Synthetic oligonucleotide"
auuuguucacugggucuuu

SEQ ID NO: 549 - RNA, 19 nt, Artificial Sequence
  source: /note="Description of Artificial Sequence: Synthetic oligonucleotide"
aauuuguucacugggucuu

SEQ ID NO: 550 - RNA, 19 nt, Artificial Sequence
  source: /note="Description of Artificial Sequence: Synthetic oligonucleotide"
agauuuguucacugggucu

SEQ ID NO: 551 - RNA, 19 nt, Artificial Sequence
  source: /note="Description of Artificial Sequence: Synthetic oligonucleotide"
aggauuuguucacuggguc

SEQ ID NO: 552 - RNA, 19 nt, Artificial Sequence
  source: /note="Description of Artificial Sequence: Synthetic oligonucleotide"
acggauuuguucacugggu

SEQ ID NO: 553 - RNA, 19 nt, Artificial Sequence
  source: /note="Description of Artificial Sequence: Synthetic oligonucleotide"
accggauuuguucacuggg

SEQ ID NO: 554 - RNA, 19 nt, Artificial Sequence
  source: /note="Description of Artificial Sequence: Synthetic oligonucleotide"
auucuuuuuggccuugccc

SEQ ID NO: 555 - RNA, 19 nt, Artificial Sequence
  source: /note="Description of Artificial Sequence: Synthetic oligonucleotide"
acuucuuuuuggccuugcc

SEQ ID NO: 556 - RNA, 19 nt, Artificial Sequence
  source: /note="Description of Artificial Sequence: Synthetic oligonucleotide"
aucuucuuuuuggccuugc

SEQ ID NO: 557 - RNA, 19 nt, Artificial Sequence
  source: /note="Description of Artificial Sequence: Synthetic oligonucleotide"
aacuucuucuuuuuggccu

SEQ ID NO: 558 - RNA, 19 nt, Artificial Sequence
  source: /note="Description of Artificial Sequence: Synthetic oligonucleotide"
acacuucuucuuuuuggcc

SEQ ID NO: 559 - RNA, 19 nt, Artificial Sequence
  source: /note="Description of Artificial Sequence: Synthetic oligonucleotide"
accacuucuucuuuuuggc

SEQ ID NO: 560 - RNA, 19 nt, Artificial Sequence
  source: /note="Description of Artificial Sequence: Synthetic oligonucleotide"
aaccacuucuucuuuuugg

SEQ ID NO: 561 - RNA, 19 nt, Artificial Sequence
  source: /note="Description of Artificial Sequence: Synthetic oligonucleotide"
agaccacuucuucuuuuug

SEQ ID NO: 562 - RNA, 19 nt, Artificial Sequence
  source: /note="Description of Artificial Sequence: Synthetic oligonucleotide"
aggaccacuucuucuuuuu

SEQ ID NO: 563 - RNA, 19 nt, Artificial Sequence
  source: /note="Description of Artificial Sequence: Synthetic oligonucleotide"
auggaccacuucuucuuuu

SEQ ID NO: 564 - RNA, 19 nt, Artificial Sequence
  source: /note="Description of Artificial Sequence: Synthetic oligonucleotide"
auuggaccacuucuucuuu

SEQ ID NO: 565 - RNA, 19 nt, Artificial Sequence
  source: /note="Description of Artificial Sequence: Synthetic oligonucleotide"
auuuggaccacuucuucuu

SEQ ID NO: 566 - RNA, 19 nt, Artificial Sequence
  source: /note="Description of Artificial Sequence: Synthetic oligonucleotide"
acuuuggaccacuucuucu

SEQ ID NO: 567 - RNA, 19 nt, Artificial Sequence
  source: /note="Description of Artificial Sequence: Synthetic oligonucleotide"
accuuuggaccacuucuuc

SEQ ID NO: 568 - RNA, 19 nt, Artificial Sequence
  source: /note="Description of Artificial Sequence: Synthetic oligonucleotide"
agccuuuggaccacuucuu

SEQ ID NO: 569 - RNA, 19 nt, Artificial Sequence
  source: /note="Description of Artificial Sequence: Synthetic oligonucleotide"
augccuuuggaccacuucu

SEQ ID NO: 570 - RNA, 19 nt, Artificial Sequence
  source: /note="Description of Artificial Sequence: Synthetic oligonucleotide"
auugccuuuggaccacuuc

SEQ ID NO: 571 - RNA, 19 nt, Artificial Sequence
  source: /note="Description of Artificial Sequence: Synthetic oligonucleotide"
auuugccuuuggaccacuu

SEQ ID NO: 572 - RNA, 19 nt, Artificial Sequence
  source: /note="Description of Artificial Sequence: Synthetic oligonucleotide"
acuuugccuuuggaccacu

SEQ ID NO: 573 - RNA, 19 nt, Artificial Sequence
  source: /note="Description of Artificial Sequence: Synthetic oligonucleotide"
aacuuugccuuuggaccac

SEQ ID NO: 574 - RNA, 19 nt, Artificial Sequence
  source: /note="Description of Artificial Sequence: Synthetic oligonucleotide"
aaacuuugccuuuggacca

SEQ ID NO: 575 - RNA, 19 nt, Artificial Sequence
  source: /note="Description of Artificial Sequence: Synthetic oligonucleotide"
agaacuuugccuuuggacc

SEQ ID NO: 576 - RNA, 19 nt, Artificial Sequence
  source: /note="Description of Artificial Sequence: Synthetic oligonucleotide"
acgaacuuugccuuuggac

SEQ ID NO: 577 - RNA, 19 nt, Artificial Sequence
  source: /note="Description of Artificial Sequence: Synthetic oligonucleotide"
accgaacuuugccuuugga

SEQ ID NO: 578 - RNA, 19 nt, Artificial Sequence
  source: /note="Description of Artificial Sequence: Synthetic oligonucleotide"
acccgaacuuugccuuugg

SEQ ID NO: 579 - RNA, 19 nt, Artificial Sequence
  source: /note="Description of Artificial Sequence: Synthetic oligonucleotide"
aucccgaacuuugccuuug

SEQ ID NO: 580 - RNA, 19 nt, Artificial Sequence
  source: /note="Description of Artificial Sequence: Synthetic oligonucleotide"
agucccgaacuuugccuuu

SEQ ID NO: 581 - RNA, 19 nt, Artificial Sequence
  source: /note="Description of Artificial Sequence: Synthetic oligonucleotide"
augucccgaacuuugccuu

SEQ ID NO: 582 - RNA, 19 nt, Artificial Sequence
  source: /note="Description of Artificial Sequence: Synthetic oligonucleotide"
auugucccgaacuuugccu

SEQ ID NO: 583 - RNA, 19 nt, Artificial Sequence
  source: /note="Description of Artificial Sequence: Synthetic oligonucleotide"
acuugucccgaacuuugcc

SEQ ID NO: 584 - RNA, 19 nt, Artificial Sequence
  source: /note="Description of Artificial Sequence: Synthetic oligonucleotide"
agcuugucccgaacuuugc

SEQ ID NO: 585 - RNA, 19 nt, Artificial Sequence
  source: /note="Description of Artificial Sequence: Synthetic oligonucleotide"
aagcuugucccgaacuuug

SEQ ID NO: 586 - RNA, 19 nt, Artificial Sequence
  source: /note="Description of Artificial Sequence: Synthetic oligonucleotide"
agagcuugucccgaacuuu

SEQ ID NO: 587 - RNA, 19 nt, Artificial Sequence
  source: /note="Description of Artificial Sequence: Synthetic oligonucleotide"
augagcuugucccgaacuu

SEQ ID NO: 588 - RNA, 19 nt, Artificial Sequence
  source: /note="Description of Artificial Sequence: Synthetic oligonucleotide"
auugagcuugucccgaacu

SEQ ID NO: 589 - RNA, 19 nt, Artificial Sequence
  source: /note="Description of Artificial Sequence: Synthetic oligonucleotide"
aauugagcuugucccgaac

SEQ ID NO: 590 - RNA, 19 nt, Artificial Sequence
  source: /note="Description of Artificial Sequence: Synthetic oligonucleotide"
auauugagcuugucccgaa

SEQ ID NO: 591 - RNA, 19 nt, Artificial Sequence
  source: /note="Description of Artificial Sequence: Synthetic oligonucleotide"
auuauugagcuugucccga

SEQ ID NO: 592 - RNA, 19 nt, Artificial Sequence
  source: /note="Description of Artificial Sequence: Synthetic oligonucleotide"
aguuauugagcuugucccg

SEQ ID NO: 593 - RNA, 19 nt, Artificial Sequence
  source: /note="Description of Artificial Sequence: Synthetic oligonucleotide"
aaguuauugagcuuguccc

SEQ ID NO: 594 - RNA, 19 nt, Artificial Sequence
  source: /note="Description of Artificial Sequence: Synthetic oligonucleotide"
aaaguuauugagcuugucc

SEQ ID NO: 595 - RNA, 19 nt, Artificial Sequence
  source: /note="Description of Artificial Sequence: Synthetic oligonucleotide"
auaaguuauugagcuuguc

SEQ ID NO: 596 - RNA, 19 nt, Artificial Sequence
  source: /note="Description of Artificial Sequence: Synthetic oligonucleotide"
acuaaguuauugagcuugu

SEQ ID NO: 597 - RNA, 19 nt, Artificial Sequence
  source: /note="Description of Artificial Sequence: Synthetic oligonucleotide"
aacuaaguuauugagcuug

SEQ ID NO: 598 - RNA, 19 nt, Artificial Sequence
  source: /note="Description of Artificial Sequence: Synthetic oligonucleotide"
agacuaaguuauugagcuu

SEQ ID NO: 599 - RNA, 19 nt, Artificial Sequence
  source: /note="Description of Artificial Sequence: Synthetic oligonucleotide"
aagacuaaguuauugagcu

SEQ ID NO: 600 - RNA, 19 nt, Artificial Sequence
  source: /note="Description of Artificial Sequence: Synthetic oligonucleotide"
aaagacuaaguuauugagc

SEQ ID NO: 601 - RNA, 19 nt, Artificial Sequence
  source: /note="Description of Artificial Sequence: Synthetic oligonucleotide"
acaagacuaaguuauugag

SEQ ID NO: 602 - RNA, 19 nt, Artificial Sequence
  source: /note="Description of Artificial Sequence: Synthetic oligonucleotide"
aacaagacuaaguuauuga

SEQ ID NO: 603 - RNA, 19 nt, Artificial Sequence
  source: /note="Description of Artificial Sequence: Synthetic oligonucleotide"
aaacaagacuaaguuauug

SEQ ID NO: 604 - RNA, 19 nt, Artificial Sequence
  source: /note="Description of Artificial Sequence: Synthetic oligonucleotide"
aaaacaagacuaaguuauu

SEQ ID NO: 605 - RNA, 19 nt, Artificial Sequence
  source: /note="Description of Artificial Sequence: Synthetic oligonucleotide"
acaaacaagacuaaguuau

SEQ ID NO: 606 - RNA, 19 nt, Artificial Sequence
  source: /note="Description of Artificial Sequence: Synthetic oligonucleotide"
aucaaacaagacuaaguua

SEQ ID NO: 607 - RNA, 19 nt, Artificial Sequence
  source: /note="Description of Artificial Sequence: Synthetic oligonucleotide"
agucaaacaagacuaaguu

SEQ ID NO: 608 - RNA, 19 nt, Artificial Sequence
  source: /note="Description of Artificial Sequence: Synthetic oligonucleotide"
augucaaacaagacuaagu

SEQ ID NO: 609 - RNA, 19 nt, Artificial Sequence
  source: /note="Description of Artificial Sequence: Synthetic oligonucleotide"
auugucaaacaagacuaag

SEQ ID NO: 610 - RNA, 19 nt, Artificial Sequence
  source: /note="Description of Artificial Sequence: Synthetic oligonucleotide"
auuugucaaacaagacuaa

SEQ ID NO: 611 - RNA, 19 nt, Artificial Sequence
  source: /note="Description of Artificial Sequence: Synthetic oligonucleotide"
acuuugucaaacaagacua

SEQ ID NO: 612 - RNA, 19 nt, Artificial Sequence
  source: /note="Description of Artificial Sequence: Synthetic oligonucleotide"
agcuuugucaaacaagacu

SEQ ID NO: 613 - RNA, 19 nt, Artificial Sequence
  source: /note="Description of Artificial Sequence: Synthetic oligonucleotide"
aagcuuugucaaacaagac

SEQ ID NO: 614 - RNA, 19 nt, Artificial Sequence
  source: /note="Description of Artificial Sequence: Synthetic oligonucleotide"
auagcuuugucaaacaaga

SEQ ID NO: 615 - RNA, 19 nt, Artificial Sequence
  source: /note="Description of Artificial Sequence: Synthetic oligonucleotide"
aguagcuuugucaaacaag

SEQ ID NO: 616 - RNA, 19 nt, Artificial Sequence
  source: /note="Description of Artificial Sequence: Synthetic oligonucleotide"
agguagcuuugucaaacaa

SEQ ID NO: 617 - RNA, 19 nt, Artificial Sequence
  source: /note="Description of Artificial Sequence: Synthetic oligonucleotide"
aagguagcuuugucaaaca

SEQ ID NO: 618 - RNA, 19 nt, Artificial Sequence
  source: /note="Description of Artificial Sequence: Synthetic oligonucleotide"
auagguagcuuugucaaac

SEQ ID NO: 619 - RNA, 19 nt, Artificial Sequence
  source: /note="Description of Artificial Sequence: Synthetic oligonucleotide"
aauagguagcuuugucaaa

SEQ ID NO: 620 - RNA, 19 nt, Artificial Sequence
  source: /note="Description of Artificial Sequence: Synthetic oligonucleotide"
acauagguagcuuugucaa

SEQ ID NO: 621 - RNA, 19 nt, Artificial Sequence
  source: /note="Description of Artificial Sequence: Synthetic oligonucleotide"
aucauagguagcuuuguca

SEQ ID NO: 622 - RNA, 19 nt, Artificial Sequence
  source: /note="Description of Artificial Sequence: Synthetic oligonucleotide"
aaucauagguagcuuuguc

SEQ ID NO: 623 - RNA, 19 nt, Artificial Sequence
  source: /note="Description of Artificial Sequence: Synthetic oligonucleotide"
auaucauagguagcuuugu

SEQ ID NO: 624 - RNA, 19 nt, Artificial Sequence
  source: /note="Description of Artificial Sequence: Synthetic oligonucleotide"
auuaucauagguagcuuug

SEQ ID NO: 625 - RNA, 19 nt, Artificial Sequence
  source: /note="Description of Artificial Sequence: Synthetic oligonucleotide"
auuuaucauagguagcuuu

SEQ ID NO: 626 - RNA, 19 nt, Artificial Sequence
  source: /note="Description of Artificial Sequence: Synthetic oligonucleotide"
aguuuaucauagguagcuu

SEQ ID NO: 627 - RNA, 19 nt, Artificial Sequence
  source: /note="Description of Artificial Sequence: Synthetic oligonucleotide"
aaguuuaucauagguagcu

SEQ ID NO: 628 - RNA, 19 nt, Artificial Sequence
  source: /note="Description of Artificial Sequence: Synthetic oligonucleotide"
agaguuuaucauagguagc

SEQ ID NO: 629 - RNA, 19 nt, Artificial Sequence
  source: /note="Description of Artificial Sequence: Synthetic oligonucleotide"
aagaguuuaucauagguag

SEQ ID NO: 630 - RNA, 19 nt, Artificial Sequence
  source: /note="Description of Artificial Sequence: Synthetic oligonucleotide"
acagaguuuaucauaggua

SEQ ID NO: 631 - RNA, 19 nt, Artificial Sequence
  source: /note="Description of Artificial Sequence: Synthetic oligonucleotide"
aacagaguuuaucauaggu

SEQ ID NO: 632 - RNA, 19 nt, Artificial Sequence
  source: /note="Description of Artificial Sequence: Synthetic oligonucleotide"
auacagaguuuaucauagg

SEQ ID NO: 633 - RNA, 19 nt, Artificial Sequence
  source: /note="Description of Artificial Sequence: Synthetic oligonucleotide"
auuacagaguuuaucauag

SEQ ID NO: 634 - RNA, 19 nt, Artificial Sequence
  source: /note="Description of Artificial Sequence: Synthetic oligonucleotide"
acuuacagaguuuaucaua

SEQ ID NO: 635 - RNA, 19 nt, Artificial Sequence
  source: /note="Description of Artificial Sequence: Synthetic oligonucleotide"
accuuacagaguuuaucau

SEQ ID NO: 636 - RNA, 19 nt, Artificial Sequence
  source: /note="Description of Artificial Sequence: Synthetic oligonucleotide"
auccuuacagaguuuauca

SEQ ID NO: 637 - RNA, 19 nt, Artificial Sequence
  source: /note="Description of Artificial Sequence: Synthetic oligonucleotide"
auuccuuacagaguuuauc

SEQ ID NO: 638 - RNA, 19 nt, Artificial Sequence
  source: /note="Description of Artificial Sequence: Synthetic oligonucleotide"
acuuccuuacagaguuuau

SEQ ID NO: 639 - RNA, 19 nt, Artificial Sequence
  source: /note="Description of Artificial Sequence: Synthetic oligonucleotide"
aacuuccuuacagaguuua

SEQ ID NO: 640 - RNA, 19 nt, Artificial Sequence
  source: /note="Description of Artificial Sequence: Synthetic oligonucleotide"
aaacuuccuuacagaguuu

SEQ ID NO: 641 - RNA, 19 nt, Artificial Sequence
  source: /note="Description of Artificial Sequence: Synthetic oligonucleotide"
agaacuuccuuacagaguu

SEQ ID NO: 642 - RNA, 19 nt, Artificial Sequence
  source: /note="Description of Artificial Sequence: Synthetic oligonucleotide"
aggaacuuccuuacagagu

SEQ ID NO: 643 - RNA, 19 nt, Artificial Sequence
  source: /note="Description of Artificial Sequence: Synthetic oligonucleotide"
agggaacuuccuuacagag

SEQ ID NO: 644 - RNA, 19 nt, Artificial Sequence
  source: /note="Description of Artificial Sequence: Synthetic oligonucleotide"
augggaacuuccuuacaga

SEQ ID NO: 645 - RNA, 19 nt, Artificial Sequence
  source: /note="Description of Artificial Sequence: Synthetic oligonucleotide"
auugggaacuuccuuacag

SEQ ID NO: 646 - RNA, 19 nt, Artificial Sequence
  source: /note="Description of Artificial Sequence: Synthetic oligonucleotide"
aguugggaacuuccuuaca

SEQ ID NO: 647 - RNA, 19 nt, Artificial Sequence
  source: /note="Description of Artificial Sequence: Synthetic oligonucleotide"
aaguugggaacuuccuuac

SEQ ID NO: 648 - RNA, 19 nt, Artificial Sequence
  source: /note="Description of Artificial Sequence: Synthetic oligonucleotide"
auaguugggaacuuccuua

SEQ ID NO: 649 - RNA, 19 nt, Artificial Sequence
  source: /note="Description of Artificial Sequence: Synthetic oligonucleotide"
aauaguugggaacuuccuu

SEQ ID NO: 650 - RNA, 19 nt, Artificial Sequence
  source: /note="Description of Artificial Sequence: Synthetic oligonucleotide"
auauaguugggaacuuccu

SEQ ID NO: 651 - RNA, 19 nt, Artificial Sequence
  source: /note="Description of Artificial Sequence: Synthetic oligonucleotide"
auuauaguugggaacuucc

SEQ ID NO: 652 - RNA, 19 nt, Artificial Sequence
  source: /note="Description of Artificial Sequence: Synthetic oligonucleotide"
auuuauaguugggaacuuc

SEQ ID NO: 653 - RNA, 19 nt, Artificial Sequence
  source: /note="Description of Artificial Sequence: Synthetic oligonucleotide"
aguuuauaguugggaacuu

SEQ ID NO: 654 - RNA, 19 nt, Artificial Sequence
  source: /note="Description of Artificial Sequence: Synthetic oligonucleotide"
aaguuuauaguugggaacu

SEQ ID NO: 655 - RNA, 19 nt, Artificial Sequence
  source: /note="Description of Artificial Sequence: Synthetic oligonucleotide"
aaaguuuauaguugggaac

SEQ ID NO: 656 - RNA, 19 nt, Artificial Sequence
  source: /note="Description of Artificial Sequence: Synthetic oligonucleotide"
auaaguuuauaguugggaa

SEQ ID NO: 657 - RNA, 19 nt, Artificial Sequence
  source: /note="Description of Artificial Sequence: Synthetic oligonucleotide"
aauaaguuuauaguuggga

SEQ ID NO: 658 - RNA, 19 nt, Artificial Sequence
  source: /note="Description of Artificial Sequence: Synthetic oligonucleotide"
auauaaguuuauaguuggg

SEQ ID NO: 659 - RNA, 19 nt, Artificial Sequence
  source: /note="Description of Artificial Sequence: Synthetic oligonucleotide"
auuauaaguuuauaguugg

SEQ ID NO: 660 - RNA, 19 nt, Artificial Sequence
  source: /note="Description of Artificial Sequence: Synthetic oligonucleotide"
aguuauaaguuuauaguug

SEQ ID NO: 661 - RNA, 19 nt, Artificial Sequence
  source: /note="Description of Artificial Sequence: Synthetic oligonucleotide"
agguuauaaguuuauaguu

SEQ ID NO: 662 - RNA, 19 nt, Artificial Sequence
  source: /note="Description of Artificial Sequence: Synthetic oligonucleotide"
aucagagaccacagcuggg

SEQ ID NO: 663 - RNA, 19 nt, Artificial Sequence
  source: /note="Description of Artificial Sequence: Synthetic oligonucleotide"
acucagagaccacagcugg

SEQ ID NO: 664 - RNA, 19 nt, Artificial Sequence
  source: /note="Description of Artificial Sequence: Synthetic oligonucleotide"
aucucagagaccacagcug

SEQ ID NO: 665 - RNA, 19 nt, Artificial Sequence
  source: /note="Description of Artificial Sequence: Synthetic oligonucleotide"
acucucagagaccacagcu

SEQ ID NO: 666 - RNA, 19 nt, Artificial Sequence
  source: /note="Description of Artificial Sequence: Synthetic oligonucleotide"
aucucucagagaccacagc

SEQ ID NO: 667 - RNA, 19 nt, Artificial Sequence
  source: /note="Description of Artificial Sequence: Synthetic oligonucleotide"
agucucucagagaccacag

SEQ ID NO: 668 - RNA, 19 nt, Artificial Sequence
  source: /note="Description of Artificial Sequence: Synthetic oligonucleotide"
aagucucucagagaccaca

SEQ ID NO: 669 - RNA, 19 nt, Artificial Sequence
  source: /note="Description of Artificial Sequence: Synthetic oligonucleotide"
acagucucucagagaccac

SEQ ID NO: 670 - RNA, 19 nt, Artificial Sequence
  source: /note="Description of Artificial Sequence: Synthetic oligonucleotide"
aucagucucucagagacca

SEQ ID NO: 671 - RNA, 19 nt, Artificial Sequence
  source: /note="Description of Artificial Sequence: Synthetic oligonucleotide"
auucagucucucagagacc

SEQ ID NO: 672 - RNA, 19 nt, Artificial Sequence
  source: /note="Description of Artificial Sequence: Synthetic oligonucleotide"
acuucagucucucagagac

SEQ ID NO: 673 - RNA, 19 nt, Artificial Sequence
  source: /note="Description of Artificial Sequence: Synthetic oligonucleotide"
aucuucagucucucagaga

SEQ ID NO: 674 - RNA, 19 nt, Artificial Sequence
  source: /note="Description of Artificial Sequence: Synthetic oligonucleotide"
aaucuucagucucucagag

SEQ ID NO: 675 - RNA, 19 nt, Artificial Sequence
  source: /note="Description of Artificial Sequence: Synthetic oligonucleotide"
aaaucuucagucucucaga

SEQ ID NO: 676 - RNA, 19 nt, Artificial Sequence
  source: /note="Description of Artificial Sequence: Synthetic oligonucleotide"
agaaucuucagucucucag

SEQ ID NO: 677 - RNA, 19 nt, Artificial Sequence
  source: /note="Description of Artificial Sequence: Synthetic oligonucleotide"
acgaaucuucagucucuca

SEQ ID NO: 678 - RNA, 19 nt, Artificial Sequence
  source: /note="Description of Artificial Sequence: Synthetic oligonucleotide"
aucgaaucuucagucucuc

SEQ ID NO: 679 - RNA, 19 nt, Artificial Sequence
  source: /note="Description of Artificial Sequence: Synthetic oligonucleotide"
acucgaaucuucagucucu

SEQ ID NO: 680 - RNA, 19 nt, Artificial Sequence
  source: /note="Description of Artificial Sequence: Synthetic oligonucleotide"
accucgaaucuucagucuc

SEQ ID NO: 681 - RNA, 19 nt, Artificial Sequence
  source: /note="Description of Artificial Sequence: Synthetic oligonucleotide"
agccucgaaucuucagucu

SEQ ID NO: 682 - RNA, 19 nt, Artificial Sequence
  source: /note="Description of Artificial Sequence: Synthetic oligonucleotide"
aagccucgaaucuucaguc

SEQ ID NO: 683 - RNA, 19 nt, Artificial Sequence
  source: /note="Description of Artificial Sequence: Synthetic oligonucleotide"
agagccucgaaucuucagu

SEQ ID NO: 684 - RNA, 19 nt, Artificial Sequence
  source: /note="Description of Artificial Sequence: Synthetic oligonucleotide"
aggagccucgaaucuucag

SEQ ID NO: 685 - RNA, 19 nt, Artificial Sequence
  source: /note="Description of Artificial Sequence: Synthetic oligonucleotide"
agggagccucgaaucuuca

SEQ ID NO: 686 - RNA, 19 nt, Artificial Sequence
  source: /note="Description of Artificial Sequence: Synthetic oligonucleotide"
aagggagccucgaaucuuc

SEQ ID NO: 687 - RNA, 19 nt, Artificial Sequence
  source: /note="Description of Artificial Sequence: Synthetic oligonucleotide"
acagggagccucgaaucuu

SEQ ID NO: 688 - RNA, 19 nt, Artificial Sequence
  source: /note="Description of Artificial Sequence: Synthetic oligonucleotide"
accagggagccucgaaucu

SEQ ID NO: 689 - RNA, 19 nt, Artificial Sequence
  source: /note="Description of Artificial Sequence: Synthetic oligonucleotide"
agccagggagccucgaauc

SEQ ID NO: 690 - RNA, 19 nt, Artificial Sequence
  source: /note="Description of Artificial Sequence: Synthetic oligonucleotide"
aggccagggagccucgaau

SEQ ID NO: 691 - RNA, 19 nt, Artificial Sequence
  source: /note="Description of Artificial Sequence: Synthetic oligonucleotide"
auggccagggagccucgaa

SEQ ID NO: 692 - RNA, 19 nt, Artificial Sequence
  source: /note="Description of Artificial Sequence: Synthetic oligonucleotide"
acuggccagggagccucga

SEQ ID NO: 693 - RNA, 19 nt, Artificial Sequence
  source: /note="Description of Artificial Sequence: Synthetic oligonucleotide"
aaagggcugcccuggccag

SEQ ID NO: 694 - RNA, 19 nt, Artificial Sequence
  source: /note="Description of Artificial Sequence: Synthetic oligonucleotide"
agaagggcugcccuggcca

SEQ ID NO: 695 - RNA, 19 nt, Artificial Sequence
  source: /note="Description of Artificial Sequence: Synthetic oligonucleotide"
augaagggcugcccuggcc

SEQ ID NO: 696 - RNA, 19 nt, Artificial Sequence
  source: /note="Description of Artificial Sequence: Synthetic oligonucleotide"
acugaagggcugcccuggc

SEQ ID NO: 697 - RNA, 19 nt, Artificial Sequence
  source: /note="Description of Artificial Sequence: Synthetic oligonucleotide"
accugaagggcugcccugg

SEQ ID NO: 698 - RNA, 19 nt, Artificial Sequence
  source: /note="Description of Artificial Sequence: Synthetic oligonucleotide"
auccugaagggcugcccug

SEQ ID NO: 699 - RNA, 19 nt, Artificial Sequence
  source: /note="Description of Artificial Sequence: Synthetic oligonucleotide"
acuccugaagggcugcccu

SEQ ID NO: 700 - RNA, 19 nt, Artificial Sequence
  source: /note="Description of Artificial Sequence: Synthetic oligonucleotide"
agcuccugaagggcugccc

SEQ ID NO: 701 - RNA, 19 nt, Artificial Sequence
  source: /note="Description of Artificial Sequence: Synthetic oligonucleotide"
aagcuccugaagggcugcc

SEQ ID NO: 702 - RNA, 19 nt, Artificial Sequence
  source: /note="Description of Artificial Sequence: Synthetic oligonucleotide"
agagcuccugaagggcugc

SEQ ID NO: 703 - RNA, 19 nt, Artificial Sequence
  source: /note="Description of Artificial Sequence: Synthetic oligonucleotide"
aggagcuccugaagggcug

SEQ ID NO: 704 - RNA, 19 nt, Artificial Sequence
  source: /note="Description of Artificial Sequence: Synthetic oligonucleotide"
aaggagcuccugaagggcu

SEQ ID NO: 705 - RNA, 19 nt, Artificial Sequence
  source: /note="Description of Artificial Sequence: Synthetic oligonucleotide"
aaaggagcuccugaagggc

SEQ ID NO: 706 - RNA, 19 nt, Artificial Sequence
  source: /note="Description of Artificial Sequence: Synthetic oligonucleotide"
auaaggagcuccugaaggg

SEQ ID NO: 707 - RNA, 19 nt, Artificial Sequence
  source: /note="Description of Artificial Sequence: Synthetic oligonucleotide"
acuaaggagcuccugaagg

SEQ ID NO: 708 - RNA, 19 nt, Artificial Sequence
  source: /note="Description of Artificial Sequence: Synthetic oligonucleotide"
aacuaaggagcuccugaag

SEQ ID NO: 709 - RNA, 19 nt, Artificial Sequence
  source: /note="Description of Artificial Sequence: Synthetic oligonucleotide"
auacuaaggagcuccugaa

SEQ ID NO: 710 - RNA, 19 nt, Artificial Sequence
  source: /note="Description of Artificial Sequence: Synthetic oligonucleotide"
auuacuaaggagcuccuga

SEQ ID NO: 711 - RNA, 19 nt, Artificial Sequence
  source: /note="Description of Artificial Sequence: Synthetic oligonucleotide"
auuuacuaaggagcuccug

SEQ ID NO: 712 - RNA, 19 nt, Artificial Sequence
  source: /note="Description of Artificial Sequence: Synthetic oligonucleotide"
acuuuacuaaggagcuccu

SEQ ID NO: 713 - RNA, 19 nt, Artificial Sequence
  source: /note="Description of Artificial Sequence: Synthetic oligonucleotide"
accuuuacuaaggagcucc

SEQ ID NO: 714 - RNA, 19 nt, Artificial Sequence
  source: /note="Description of Artificial Sequence: Synthetic oligonucleotide"
auccuuuacuaaggagcuc

SEQ ID NO: 715 - RNA, 19 nt, Artificial Sequence
  source: /note="Description of Artificial Sequence: Synthetic oligonucleotide"
aguccuuuacuaaggagcu

SEQ ID NO: 716 - RNA, 19 nt, Artificial Sequence
  source: /note="Description of Artificial Sequence: Synthetic oligonucleotide"
aaguccuuuacuaaggagc

SEQ ID NO: 717 - RNA, 19 nt, Artificial Sequence
  source: /note="Description of Artificial Sequence: Synthetic oligonucleotide"
aaaguccuuuacuaaggag

SEQ ID NO: 718 - RNA, 19 nt, Artificial Sequence
  source: /note="Description of Artificial Sequence: Synthetic oligonucleotide"
auaaguccuuuacuaagga

SEQ ID NO: 719 - RNA, 19 nt, Artificial Sequence
  source: /note="Description of Artificial Sequence: Synthetic oligonucleotide"
aauaaguccuuuacuaagg

SEQ ID NO: 720 - RNA, 19 nt, Artificial Sequence
  source: /note="Description of Artificial Sequence: Synthetic oligonucleotide"
agauaaguccuuuacuaag

SEQ ID NO: 721 - RNA, 19 nt, Artificial Sequence
  source: /note="Description of Artificial Sequence: Synthetic oligonucleotide"
augauaaguccuuuacuaa

SEQ ID NO: 722 - RNA, 19 nt, Artificial Sequence
  source: /note="Description of Artificial Sequence: Synthetic oligonucleotide"
auugauaaguccuuuacua

SEQ ID NO: 723 - RNA, 19 nt, Artificial Sequence
  source: /note="Description of Artificial Sequence: Synthetic oligonucleotide"
auuugauaaguccuuuacu

SEQ ID NO: 724 - RNA, 19 nt, Artificial Sequence
  source: /note="Description of Artificial Sequence: Synthetic oligonucleotide"
aguuugauaaguccuuuac

SEQ ID NO: 725 - RNA, 19 nt, Artificial Sequence
  source: /note="Description of Artificial Sequence: Synthetic oligonucleotide"
aaguuugauaaguccuuua

SEQ ID NO: 726 - RNA, 19 nt, Artificial Sequence
  source: /note="Description of Artificial Sequence: Synthetic oligonucleotide"
acaguuugauaaguccuuu

SEQ ID NO: 727 - RNA, 19 nt, Artificial Sequence
  source: /note="Description of Artificial Sequence: Synthetic oligonucleotide"
accaguuugauaaguccuu

SEQ ID NO: 728 - RNA, 19 nt, Artificial Sequence
  source: /note="Description of Artificial Sequence: Synthetic oligonucleotide"
aaccaguuugauaaguccu

SEQ ID NO: 729 - RNA, 19 nt, Artificial Sequence
  source: /note="Description of Artificial Sequence: Synthetic oligonucleotide"
aaaccaguuugauaagucc

SEQ ID NO: 730 - RNA, 19 nt, Artificial Sequence
  source: /note="Description of Artificial Sequence: Synthetic oligonucleotide"
aaaaccaguuugauaaguc

SEQ ID NO: 731 - RNA, 19 nt, Artificial Sequence
  source: /note="Description of Artificial Sequence: Synthetic oligonucleotide"
agaaaccaguuugauaagu

SEQ ID NO: 732 - RNA, 19 nt, Artificial Sequence
  source: /note="Description of Artificial Sequence: Synthetic oligonucleotide"
augaaaccaguuugauaag

SEQ ID NO: 733 - RNA, 19 nt, Artificial Sequence
  source: /note="Description of Artificial Sequence: Synthetic oligonucleotide"
auugaaaccaguuugauaa

SEQ ID NO: 734 - RNA, 19 nt, Artificial Sequence
  source: /note="Description of Artificial Sequence: Synthetic oligonucleotide"
auuugaaaccaguuugaua

SEQ ID NO: 735 - RNA, 19 nt, Artificial Sequence
  source: /note="Description of Artificial Sequence: Synthetic oligonucleotide"
acuuugaaaccaguuugau

SEQ ID NO: 736 - RNA, 19 nt, Artificial Sequence
  source: /note="Description of Artificial Sequence: Synthetic oligonucleotide"
agcuuugaaaccaguuuga

SEQ ID NO: 737 - RNA, 19 nt, Artificial Sequence
  source: /note="Description of Artificial Sequence: Synthetic oligonucleotide"
augcuuugaaaccaguuug

SEQ ID NO: 738 - RNA, 19 nt, Artificial Sequence
  source: /note="Description of Artificial Sequence: Synthetic oligonucleotide"
agugcuuugaaaccaguuu

SEQ ID NO: 739 - RNA, 19 nt, Artificial Sequence
  source: /note="Description of Artificial Sequence: Synthetic oligonucleotide"
augugcuuugaaaccaguu

SEQ ID NO: 740 - RNA, 19 nt, Artificial Sequence
  source: /note="Description of Artificial Sequence: Synthetic oligonucleotide"
acugugcuuugaaaccagu

SEQ ID NO: 741 - RNA, 19 nt, Artificial Sequence
  source: /note="Description of Artificial Sequence: Synthetic oligonucleotide"
aucugugcuuugaaaccag

SEQ ID NO: 742 - RNA, 19 nt, Artificial Sequence
  source: /note="Description of Artificial Sequence: Synthetic oligonucleotide"
acucugugcuuugaaacca

SEQ ID NO: 743 - RNA, 19 nt, Artificial Sequence
  source: /note="Description of Artificial Sequence: Synthetic oligonucleotide"
agcucugugcuuugaaacc

SEQ ID NO: 744 - RNA, 19 nt, Artificial Sequence
  source: /note="Description of Artificial Sequence: Synthetic oligonucleotide"
aagcucugugcuuugaaac

SEQ ID NO: 745 - RNA, 19 nt, Artificial Sequence
  source: /note="Description of Artificial Sequence: Synthetic oligonucleotide"
agagcucugugcuuugaaa

SEQ ID NO: 746 - RNA, 19 nt, Artificial Sequence
  source: /note="Description of Artificial Sequence: Synthetic oligonucleotide"
augagcucugugcuuugaa

SEQ ID NO: 747 - RNA, 19 nt, Artificial Sequence
  source: /note="Description of Artificial Sequence: Synthetic oligonucleotide"
auugagcucugugcuuuga

SEQ ID NO: 748 - RNA, 19 nt, Artificial Sequence
  source: /note="Description of Artificial Sequence: Synthetic oligonucleotide"
acuugagcucugugcuuug

SEQ ID NO: 749 - RNA, 19 nt, Artificial Sequence
  source: /note="Description of Artificial Sequence: Synthetic oligonucleotide"
aacuugagcucugugcuuu

SEQ ID NO: 750 - RNA, 19 nt, Artificial Sequence
  source: /note="Description of Artificial Sequence: Synthetic oligonucleotide"
auacuugagcucugugcuu

SEQ ID NO: 751 - RNA, 19 nt, Artificial Sequence
  source: /note="Description of Artificial Sequence: Synthetic oligonucleotide"
auuacuugagcucugugcu

SEQ ID NO: 752 - RNA, 19 nt, Artificial Sequence
  source: /note="Description of Artificial Sequence: Synthetic oligonucleotide"
aauuacuugagcucugugc

SEQ ID NO: 753 - RNA, 19 nt, Artificial Sequence
  source: /note="Description of Artificial Sequence: Synthetic oligonucleotide"
aaauuacuugagcucugug

SEQ ID NO: 754 - RNA, 19 nt, Artificial Sequence
  source: /note="Description of Artificial Sequence: Synthetic oligonucleotide"
aaaauuacuugagcucugu

SEQ ID NO: 755 - RNA, 19 nt, Artificial Sequence
  source: /note="Description of Artificial Sequence: Synthetic oligonucleotide"
auaaauuacuugagcucug

SEQ ID NO: 756 - RNA, 19 nt, Artificial Sequence
  source: /note="Description of Artificial Sequence: Synthetic oligonucleotide"
aguaaauuacuugagcucu

SEQ ID NO: 757 - RNA, 19 nt, Artificial Sequence
  source: /note="Description of Artificial Sequence: Synthetic oligonucleotide"
auguaaauuacuugagcuc

SEQ ID NO: 758 - RNA, 19 nt, Artificial Sequence
  source: /note="Description of Artificial Sequence: Synthetic oligonucleotide"
aguguaaauuacuugagcu

SEQ ID NO: 759 - RNA, 19 nt, Artificial Sequence
  source: /note="Description of Artificial Sequence: Synthetic oligonucleotide"
agguguaaauuacuugagc

SEQ ID NO: 760 - RNA, 19 nt, Artificial Sequence
  source: /note="Description of Artificial Sequence: Synthetic oligonucleotide"
augguguaaauuacuugag

SEQ ID NO: 761 - RNA, 19 nt, Artificial Sequence
  source: /note="Description of Artificial Sequence: Synthetic oligonucleotide"
acugguguaaauuacuuga

SEQ ID NO: 762 - RNA, 19 nt, Artificial Sequence
  source: /note="Description of Artificial Sequence: Synthetic oligonucleotide"
aucugguguaaauuacuug

SEQ ID NO: 763 - RNA, 19 nt, Artificial Sequence
  source: /note="Description of Artificial Sequence: Synthetic oligonucleotide"
auucugguguaaauuacuu

SEQ ID NO: 764 - RNA, 19 nt, Artificial Sequence
  source: /note="Description of Artificial Sequence: Synthetic oligonucleotide"
auuucugguguaaauuacu

SEQ ID NO: 765 - RNA, 19 nt, Artificial Sequence
  source: /note="Description of Artificial Sequence: Synthetic oligonucleotide"
aauuucugguguaaauuac

SEQ ID NO: 766 - RNA, 19 nt, Artificial Sequence
  source: /note="Description of Artificial Sequence: Synthetic oligonucleotide"
auauuucugguguaaauua

SEQ ID NO: 767 - RNA, 19 nt, Artificial Sequence
  source: /note="Description of Artificial Sequence: Synthetic oligonucleotide"
aguauuucugguguaaauu

SEQ ID NO: 768 - RNA, 19 nt, Artificial Sequence
  source: /note="Description of Artificial Sequence: Synthetic oligonucleotide"
agguauuucugguguaaau

SEQ ID NO: 769 - RNA, 19 nt, Artificial Sequence
  source: /note="Description of Artificial Sequence: Synthetic oligonucleotide"
augguauuucugguguaaa

SEQ ID NO: 770 - RNA, 19 nt, Artificial Sequence
  source: /note="Description of Artificial Sequence: Synthetic oligonucleotide"
auugguauuucugguguaa

SEQ ID NO: 771 - RNA, 19 nt, Artificial Sequence
  source: /note="Description of Artificial Sequence: Synthetic oligonucleotide"
acuugguauuucuggugua

SEQ ID NO: 772 - RNA, 19 nt, Artificial Sequence
  source: /note="Description of Artificial Sequence: Synthetic oligonucleotide"
accuugguauuucuggugu

SEQ ID NO: 773 - RNA, 19 nt, Artificial Sequence
  source: /note="Description of Artificial Sequence: Synthetic oligonucleotide"
acccuugguauuucuggug

SEQ ID NO: 774 - RNA, 19 nt, Artificial Sequence
  source: /note="Description of Artificial Sequence: Synthetic oligonucleotide"
aacccuugguauuucuggu

SEQ ID NO: 775 - RNA, 19 nt, Artificial Sequence
  source: /note="Description of Artificial Sequence: Synthetic oligonucleotide"
acacccuugguauuucugg

SEQ ID NO: 776 - RNA, 19 nt, Artificial Sequence
  source: /note="Description of Artificial Sequence: Synthetic oligonucleotide"
accacccuugguauuucug

SEQ ID NO: 777 - RNA, 19 nt, Artificial Sequence
  source: /note="Description of Artificial Sequence: Synthetic oligonucleotide"
auccacccuugguauuucu

SEQ ID NO: 778 - RNA, 19 nt, Artificial Sequence
  source: /note="Description of Artificial Sequence: Synthetic oligonucleotide"
acuccacccuugguauuuc

SEQ ID NO: 779 - RNA, 19 nt, Artificial Sequence
  source: /note="Description of Artificial Sequence: Synthetic oligonucleotide"
aucuccacccuugguauuu

SEQ ID NO: 780 - RNA, 19 nt, Artificial Sequence
  source: /note="Description of Artificial Sequence: Synthetic oligonucleotide"
aaucuccacccuugguauu

SEQ ID NO: 781 - RNA, 19 nt, Artificial Sequence
  source: /note="Description of Artificial Sequence: Synthetic oligonucleotide"
acaucuccacccuugguau

SEQ ID NO: 782 - RNA, 19 nt, Artificial Sequence
  source: /note="Description of Artificial Sequence: Synthetic oligonucleotide"
agcaucuccacccuuggua

SEQ ID NO: 783 - RNA, 19 nt, Artificial Sequence
  source: /note="Description of Artificial Sequence: Synthetic oligonucleotide"
aagcaucuccacccuuggu

SEQ ID NO: 784 - RNA, 19 nt, Artificial Sequence
  source: /note="Description of Artificial Sequence: Synthetic oligonucleotide"
agagcaucuccacccuugg

SEQ ID NO: 785 - RNA, 19 nt, Artificial Sequence
  source: /note="Description of Artificial Sequence: Synthetic oligonucleotide"
aggagcaucuccacccuug

SEQ ID NO: 786 - RNA, 19 nt, Artificial Sequence
  source: /note="Description of Artificial Sequence: Synthetic oligonucleotide"
auggagcaucuccacccuu

SEQ ID NO: 787 - RNA, 19 nt, Artificial Sequence
  source: /note="Description of Artificial Sequence: Synthetic oligonucleotide"
acuggagcaucuccacccu

SEQ ID NO: 788 - RNA, 19 nt, Artificial Sequence
  source: /note="Description of Artificial Sequence: Synthetic oligonucleotide"
agcuggagcaucuccaccc

SEQ ID NO: 789 - RNA, 19 nt, Artificial Sequence
  source: /note="Description of Artificial Sequence: Synthetic oligonucleotide"
aagcuggagcaucuccacc

SEQ ID NO: 790 - RNA, 19 nt, Artificial Sequence
  source: /note="Description of Artificial Sequence: Synthetic oligonucleotide"
acagcuggagcaucuccac

SEQ ID NO: 791 - RNA, 19 nt, Artificial Sequence
  source: /note="Description of Artificial Sequence: Synthetic oligonucleotide"
agcagcuggagcaucucca

SEQ ID NO: 792 - RNA, 19 nt, Artificial Sequence
  source: /note="Description of Artificial Sequence: Synthetic oligonucleotide"
aagcagcuggagcaucucc

SEQ ID NO: 793 - RNA, 19 nt, Artificial Sequence
  source: /note="Description of Artificial Sequence: Synthetic oligonucleotide"
acagcagcuggagcaucuc

SEQ ID NO: 794 - RNA, 19 nt, Artificial Sequence
  source: /note="Description of Artificial Sequence: Synthetic oligonucleotide"
accagcagcuggagcaucu

SEQ ID NO: 795 - RNA, 19 nt, Artificial Sequence
  source: /note="Description of Artificial Sequence: Synthetic oligonucleotide"
aaccagcagcuggagcauc

SEQ ID NO: 796 - RNA, 19 nt, Artificial Sequence
  source: /note="Description of Artificial Sequence: Synthetic oligonucleotide"
acaccagcagcuggagcau

SEQ ID NO: 797 - RNA, 19 nt, Artificial Sequence
  source: /note="Description of Artificial Sequence: Synthetic oligonucleotide"
aucaccagcagcuggagca

SEQ ID NO: 798 - RNA, 19 nt, Artificial Sequence
  source: /note="Description of Artificial Sequence: Synthetic oligonucleotide"
auucaccagcagcuggagc

SEQ ID NO: 799 - RNA, 19 nt, Artificial Sequence
  source: /note="Description of Artificial Sequence: Synthetic oligonucleotide"
acuucaccagcagcuggag

SEQ ID NO: 800 - RNA, 19 nt, Artificial Sequence
  source: /note="Description of Artificial Sequence: Synthetic oligonucleotide"
aucuucaccagcagcugga

SEQ ID NO: 801 - RNA, 19 nt, Artificial Sequence
  source: /note="Description of Artificial Sequence: Synthetic oligonucleotide"
aaucuucaccagcagcugg

SEQ ID NO: 802 - RNA, 19 nt, Artificial Sequence
  source: /note="Description of Artificial Sequence: Synthetic oligonucleotide"
acaucuucaccagcagcug

SEQ ID NO: 803 - RNA, 19 nt, Artificial Sequence
  source: /note="Description of Artificial Sequence: Synthetic oligonucleotide"
agcaucuucaccagcagcu

SEQ ID NO: 804 - RNA, 19 nt, Artificial Sequence
  source: /note="Description of Artificial Sequence: Synthetic oligonucleotide"
augcaucuucaccagcagc

SEQ ID NO: 805 - RNA, 19 nt, Artificial Sequence
  source: /note="Description of Artificial Sequence: Synthetic oligonucleotide"
aaugcaucuucaccagcag

SEQ ID NO: 806 - RNA, 19 nt, Artificial Sequence
  source: /note="Description of Artificial Sequence: Synthetic oligonucleotide"
acaugcaucuucaccagca

SEQ ID NO: 807 - RNA, 19 nt, Artificial Sequence
  source: /note="Description of Artificial Sequence: Synthetic oligonucleotide"
aucaugcaucuucaccagc

SEQ ID NO: 808 - RNA, 19 nt, Artificial Sequence
  source: /note="Description of Artificial Sequence: Synthetic oligonucleotide"
auucaugcaucuucaccag

SEQ ID NO: 809 - RNA, 19 nt, Artificial Sequence
  source: /note="Description of Artificial Sequence: Synthetic oligonucleotide"
aauucaugcaucuucacca

SEQ ID NO: 810 - RNA, 19 nt, Artificial Sequence
  source: /note="Description of Artificial Sequence: Synthetic oligonucleotide"
auauucaugcaucuucacc

SEQ ID NO: 811 - RNA, 19 nt, Artificial Sequence
  source: /note="Description of Artificial Sequence: Synthetic oligonucleotide"
acuauucaugcaucuucac

SEQ ID NO: 812 - RNA, 19 nt, Artificial Sequence
  source: /note="Description of Artificial Sequence: Synthetic oligonucleotide"
accuauucaugcaucuuca

SEQ ID NO: 813 - RNA, 19 nt, Artificial Sequence
  source: /note="Description of Artificial Sequence: Synthetic oligonucleotide"
aaccuauucaugcaucuuc

SEQ ID NO: 814 - RNA, 19 nt, Artificial Sequence
  source: /note="Description of Artificial Sequence: Synthetic oligonucleotide"
agaccuauucaugcaucuu

SEQ ID NO: 815 - RNA, 19 nt, Artificial Sequence
  source: /note="Description of Artificial Sequence: Synthetic oligonucleotide"
aggaccuauucaugcaucu

SEQ ID NO: 816 - RNA, 19 nt, Artificial Sequence
  source: /note="Description of Artificial Sequence: Synthetic oligonucleotide"
auggaccuauucaugcauc

SEQ ID NO: 817 - RNA, 19 nt, Artificial Sequence
  source: /note="Description of Artificial Sequence: Synthetic oligonucleotide"
auuggaccuauucaugcau

SEQ ID NO: 818 - RNA, 19 nt, Artificial Sequence
  source: /note="Description of Artificial Sequence: Synthetic oligonucleotide"
aguuggaccuauucaugca

SEQ ID NO: 819 - RNA, 19 nt, Artificial Sequence
  source: /note="Description of Artificial Sequence: Synthetic oligonucleotide"
agguuggaccuauucaugc

SEQ ID NO: 820 - RNA, 19 nt, Artificial Sequence
  source: /note="Description of Artificial Sequence: Synthetic oligonucleotide"
augguuggaccuauucaug

SEQ ID NO: 821 - RNA, 19 nt, Artificial Sequence
  source: /note="Description of Artificial Sequence: Synthetic oligonucleotide"
acugguuggaccuauucau

SEQ ID NO: 822 - RNA, 19 nt, Artificial Sequence
  source: /note="Description of Artificial Sequence: Synthetic oligonucleotide"
agcugguuggaccuauuca

SEQ ID NO: 823 - RNA, 19 nt, Artificial Sequence
  source: /note="Description of Artificial Sequence: Synthetic oligonucleotide"
aagcugguuggaccuauuc

SEQ ID NO: 824 - RNA, 19 nt, Artificial Sequence
  source: /note="Description of Artificial Sequence: Synthetic oligonucleotide"
acagcugguuggaccuauu

SEQ ID NO: 825 - RNA, 19 nt, Artificial Sequence
  source: /note="Description of Artificial Sequence: Synthetic oligonucleotide"
aacagcugguuggaccuau

SEQ ID NO: 826 - RNA, 19 nt, Artificial Sequence
  source: /note="Description of Artificial Sequence: Synthetic oligonucleotide"
auacagcugguuggaccua

SEQ ID NO: 827 - RNA, 19 nt, Artificial Sequence
  source: /note="Description of Artificial Sequence: Synthetic oligonucleotide"
aguacagcugguuggaccu

SEQ ID NO: 828 - RNA, 19 nt, Artificial Sequence
  source: /note="Description of Artificial Sequence: Synthetic oligonucleotide"
auguacagcugguuggacc

SEQ ID NO: 829 - RNA, 19 nt, Artificial Sequence
  source: /note="Description of Artificial Sequence: Synthetic oligonucleotide"
aauguacagcugguuggac

SEQ ID NO: 830 - RNA, 19 nt, Artificial Sequence
  source: /note="Description of Artificial Sequence: Synthetic oligonucleotide"
aaauguacagcugguugga

SEQ ID NO: 831 - RNA, 19 nt, Artificial Sequence
  source: /note="Description of Artificial Sequence: Synthetic oligonucleotide"
aaaauguacagcugguugg

SEQ ID NO: 832 - RNA, 19 nt, Artificial Sequence
  source: /note="Description of Artificial Sequence: Synthetic oligonucleotide"
acaaauguacagcugguug

SEQ ID NO: 833 - RNA, 19 nt, Artificial Sequence
  source: /note="Description of Artificial Sequence: Synthetic oligonucleotide"
accaaauguacagcugguu

SEQ ID NO: 834 - RNA, 19 nt, Artificial Sequence
  source: /note="Description of Artificial Sequence: Synthetic oligonucleotide"
auccaaauguacagcuggu

SEQ ID NO: 835 - RNA, 19 nt, Artificial Sequence
  source: /note="Description of Artificial Sequence: Synthetic oligonucleotide"
auuccaaauguacagcugg

SEQ ID NO: 836 - RNA, 19 nt, Artificial Sequence
  source: /note="Description of Artificial Sequence: Synthetic oligonucleotide"
auuuccaaauguacagcug

SEQ ID NO: 837 - RNA, 19 nt, Artificial Sequence
  source: /note="Description of Artificial Sequence: Synthetic oligonucleotide"
auuuuccaaauguacagcu

SEQ ID NO: 838 - RNA, 19 nt, Artificial Sequence
  source: /note="Description of Artificial Sequence: Synthetic oligonucleotide"
auuuuuccaaauguacagc

SEQ ID NO: 839 - RNA, 19 nt, Artificial Sequence
  source: /note="Description of Artificial Sequence: Synthetic oligonucleotide"
aauuuuuccaaauguacag

SEQ ID NO: 840 - RNA, 19 nt, Artificial Sequence
  source: /note="Description of Artificial Sequence: Synthetic oligonucleotide"
auauuuuuccaaauguaca

SEQ ID NO: 841 - RNA, 19 nt, Artificial Sequence
  source: /note="Description of Artificial Sequence: Synthetic oligonucleotide"
auuauuuuuccaaauguac

SEQ ID NO: 842 - RNA, 19 nt, Artificial Sequence
  source: /note="Description of Artificial Sequence: Synthetic oligonucleotide"
aguuuuauuuuuccaaaug

SEQ ID NO: 843 - DNA, 21 bp, Artificial Sequence
  source: /note="Description of Artificial Sequence: Synthetic oligonucleotide"
  source: /note="Description of Combined DNA/RNA Molecule: Synthetic oligonucleotide"
cuuuuuguccgacaucuuutt

SEQ ID NO: 844 - DNA, 21 bp, Artificial Sequence
  source: /note="Description of Artificial Sequence: Synthetic oligonucleotide"
  source: /note="Description of Combined DNA/RNA Molecule: Synthetic oligonucleotide"
uuuuuguccgacaucuugutt

SEQ ID NO: 845 - DNA, 21 bp, Artificial Sequence
  source: /note="Description of Artificial Sequence: Synthetic oligonucleotide"
  source: /note="Description of Combined DNA/RNA Molecule: Synthetic oligonucleotide"
uuuuguccgacaucuugautt

SEQ ID NO: 846 - DNA, 21 bp, Artificial Sequence
  source: /note="Description of Artificial Sequence: Synthetic oligonucleotide"
  source: /note="Description of Combined DNA/RNA Molecule: Synthetic oligonucleotide"
uuuguccgacaucuugacutt

SEQ ID NO: 847 - DNA, 21 bp, Artificial Sequence
  source: /note="Description of Artificial Sequence: Synthetic oligonucleotide"
  source: /note="Description of Combined DNA/RNA Molecule: Synthetic oligonucleotide"
uuguccgacaucuugacgutt

SEQ ID NO: 848 - DNA, 21 bp, Artificial Sequence
  source: /note="Description of Artificial Sequence: Synthetic oligonucleotide"
  source: /note="Description of Combined DNA/RNA Molecule: Synthetic oligonucleotide"
uguccgacaucuugacgautt

SEQ ID NO: 849 - DNA, 21 bp, Artificial Sequence
  source: /note="Description of Artificial Sequence: Synthetic oligonucleotide"
  source: /note="Description of Combined DNA/RNA Molecule: Synthetic oligonucleotide"
guccgacaucuugacgagutt

SEQ ID NO: 850 - DNA, 21 bp, Artificial Sequence
  source: /note="Description of Artificial Sequence: Synthetic oligonucleotide"
  source: /note="Description of Combined DNA/RNA Molecule: Synthetic oligonucleotide"
uccgacaucuugacgaggutt

SEQ ID NO: 851 - DNA, 21 bp, Artificial Sequence
  source: /note="Description of Artificial Sequence: Synthetic oligonucleotide"
  source: /note="Description of Combined DNA/RNA Molecule: Synthetic oligonucleotide"
ccgacaucuugacgaggcutt

SEQ ID NO: 852 - DNA, 21 bp, Artificial Sequence
  source: /note="Description of Artificial Sequence: Synthetic oligonucleotide"
  source: /note="Description of Combined DNA/RNA Molecule: Synthetic oligonucleotide"
cgacaucuugacgaggcuutt

SEQ ID NO: 853 - DNA, 21 bp, Artificial Sequence
  source: /note="Description of Artificial Sequence: Synthetic oligonucleotide"
  source: /note="Description of Combined DNA/RNA Molecule: Synthetic oligonucleotide"
gacaucuugacgaggcugutt

SEQ ID NO: 854 - DNA, 21 bp, Artificial Sequence
  source: /note="Description of Artificial Sequence: Synthetic oligonucleotide"
  source: /note="Description of Combined DNA/RNA Molecule: Synthetic oligonucleotide"
acaucuugacgaggcugcutt

SEQ ID NO: 855 - DNA, 21 bp, Artificial Sequence
  source: /note="Description of Artificial Sequence: Synthetic oligonucleotide"
  source: /note="Description of Combined DNA/RNA Molecule: Synthetic oligonucleotide"
caucuugacgaggcugcgutt

SEQ ID NO: 856 - DNA, 21 bp, Artificial Sequence
  source: /note="Description of Artificial Sequence: Synthetic oligonucleotide"
  source: /note="Description of Combined DNA/RNA Molecule: Synthetic oligonucleotide"
aucuugacgaggcugcggutt

SEQ ID NO: 857 - DNA, 21 bp, Artificial Sequence
  source: /note="Description of Artificial Sequence: Synthetic oligonucleotide"
  source: /note="Description of Combined DNA/RNA Molecule: Synthetic oligonucleotide"
ucuugacgaggcugcgguutt

SEQ ID NO: 858 - DNA, 21 bp, Artificial Sequence
  source: /note="Description of Artificial Sequence: Synthetic oligonucleotide"
  source: /note="Description of Combined DNA/RNA Molecule: Synthetic oligonucleotide"
cuugacgaggcugcggugutt

SEQ ID NO: 859 - DNA, 21 bp, Artificial Sequence
  source: /note="Description of Artificial Sequence: Synthetic oligonucleotide"
  source: /note="Description of Combined DNA/RNA Molecule: Synthetic oligonucleotide"
uugacgaggcugcgguguutt

SEQ ID NO: 860 - DNA, 21 bp, Artificial Sequence
  source: /note="Description of Artificial Sequence: Synthetic oligonucleotide"
  source: /note="Description of Combined DNA/RNA Molecule: Synthetic oligonucleotide"
ugacgaggcugcggugucutt

SEQ ID NO: 861 - DNA, 21 bp, Artificial Sequence
  source: /note="Description of Artificial Sequence: Synthetic oligonucleotide"
  source: /note="Description of Combined DNA/RNA Molecule: Synthetic oligonucleotide"
gacgaggcugcggugucuutt

SEQ ID NO: 862 - DNA, 21 bp, Artificial Sequence
  source: /note="Description of Artificial Sequence: Synthetic oligonucleotide"
  source: /note="Description of Combined DNA/RNA Molecule: Synthetic oligonucleotide"
acgaggcugcggugucugutt

SEQ ID NO: 863 - DNA, 21 bp, Artificial Sequence
  source: /note="Description of Artificial Sequence: Synthetic oligonucleotide"
  source: /note="Description of Combined DNA/RNA Molecule: Synthetic oligonucleotide"
cgaggcugcggugucugcutt

SEQ ID NO: 864 - DNA, 21 bp, Artificial Sequence
  source: /note="Description of Artificial Sequence: Synthetic oligonucleotide"
  source: /note="Description of Combined DNA/RNA Molecule: Synthetic oligonucleotide"
gaggcugcggugucugcuutt

SEQ ID NO: 865 - DNA, 21 bp, Artificial Sequence
  source: /note="Description of Artificial Sequence: Synthetic oligonucleotide"
  source: /note="Description of Combined DNA/RNA Molecule: Synthetic oligonucleotide"
aggcugcggugucugcugutt

SEQ ID NO: 866 - DNA, 21 bp, Artificial Sequence
  source: /note="Description of Artificial Sequence: Synthetic oligonucleotide"
  source: /note="Description of Combined DNA/RNA Molecule: Synthetic oligonucleotide"
ggcugcggugucugcugcutt

SEQ ID NO: 867 - DNA, 21 bp, Artificial Sequence
  source: /note="Description of Artificial Sequence: Synthetic oligonucleotide"
  source: /note="Description of Combined DNA/RNA Molecule: Synthetic oligonucleotide"
gcugcggugucugcugcuutt

SEQ ID NO: 868 - DNA, 21 bp, Artificial Sequence
  source: /note="Description of Artificial Sequence: Synthetic oligonucleotide"
  source: /note="Description of Combined DNA/RNA Molecule: Synthetic oligonucleotide"
cugcggugucugcugcuautt

SEQ ID NO: 869 - DNA, 21 bp, Artificial Sequence
  source: /note="Description of Artificial Sequence: Synthetic oligonucleotide"
  source: /note="Description of Combined DNA/RNA Molecule: Synthetic oligonucleotide"
ugcggugucugcugcuauutt

SEQ ID NO: 870 - DNA, 21 bp, Artificial Sequence
  source: /note="Description of Artificial Sequence: Synthetic oligonucleotide"
  source: /note="Description of Combined DNA/RNA Molecule: Synthetic oligonucleotide"
gcggugucugcugcuauuutt

SEQ ID NO: 871 - DNA, 21 bp, Artificial Sequence
  source: /note="Description of Artificial Sequence: Synthetic oligonucleotide"
  source: /note="Description of Combined DNA/RNA Molecule: Synthetic oligonucleotide"
cggugucugcugcuauucutt

SEQ ID NO: 872 - DNA, 21 bp, Artificial Sequence
  source: /note="Description of Artificial Sequence: Synthetic oligonucleotide"
  source: /note="Description of Combined DNA/RNA Molecule: Synthetic oligonucleotide"
ggugucugcugcuauucuutt

SEQ ID NO: 873 - DNA, 21 bp, Artificial Sequence
  source: /note="Description of Artificial Sequence: Synthetic oligonucleotide"
  source: /note="Description of Combined DNA/RNA Molecule: Synthetic oligonucleotide"
gugucugcugcuauucucutt

SEQ ID NO: 874 - DNA, 21 bp, Artificial Sequence
  source: /note="Description of Artificial Sequence: Synthetic oligonucleotide"
  source: /note="Description of Combined DNA/RNA Molecule: Synthetic oligonucleotide"
ugucugcugcuauucuccutt

SEQ ID NO: 875 - DNA, 21 bp, Artificial Sequence
  source: /note="Description of Artificial Sequence: Synthetic oligonucleotide"
  source: /note="Description of Combined DNA/RNA Molecule: Synthetic oligonucleotide"
gucugcugcuauucuccgutt

SEQ ID NO: 876 - DNA, 21 bp, Artificial Sequence
  source: /note="Description of Artificial Sequence: Synthetic oligonucleotide"
  source: /note="Description of Combined DNA/RNA Molecule: Synthetic oligonucleotide"
ucugcugcuauucuccgautt

SEQ ID NO: 877 - DNA, 21 bp, Artificial Sequence
  source: /note="Description of Artificial Sequence: Synthetic oligonucleotide"
  source: /note="Description of Combined DNA/RNA Molecule: Synthetic oligonucleotide"
cugcugcuauucuccgagutt

SEQ ID NO: 878 - DNA, 21 bp, Artificial Sequence
  source: /note="Description of Artificial Sequence: Synthetic oligonucleotide"
  source: /note="Description of Combined DNA/RNA Molecule: Synthetic oligonucleotide"
ugcugcuauucuccgagcutt

SEQ ID NO: 879 - DNA, 21 bp, Artificial Sequence
  source: /note="Description of Artificial Sequence: Synthetic oligonucleotide"
  source: /note="Description of Combined DNA/RNA Molecule: Synthetic oligonucleotide"
gcugcuauucuccgagcuutt

SEQ ID NO: 880 - DNA, 21 bp, Artificial Sequence
  source: /note="Description of Artificial Sequence: Synthetic oligonucleotide"
  source: /note="Description of Combined DNA/RNA Molecule: Synthetic oligonucleotide"
cugcuauucuccgagcuuutt

SEQ ID NO: 881 - DNA, 21 bp, Artificial Sequence
  source: /note="Description of Artificial Sequence: Synthetic oligonucleotide"
  source: /note="Description of Combined DNA/RNA Molecule: Synthetic oligonucleotide"
ugcuauucuccgagcuucutt

SEQ ID NO: 882 - DNA, 21 bp, Artificial Sequence
  source: /note="Description of Artificial Sequence: Synthetic oligonucleotide"
  source: /note="Description of Combined DNA/RNA Molecule: Synthetic oligonucleotide"
gcuauucuccgagcuucgutt

SEQ ID NO: 883 - DNA, 21 bp, Artificial Sequence
  source: /note="Description of Artificial Sequence: Synthetic oligonucleotide"
  source: /note="Description of Combined DNA/RNA Molecule: Synthetic oligonucleotide"
cuauucuccgagcuucgcutt

SEQ ID NO: 884 - DNA, 21 bp, Artificial Sequence
  source: /note="Description of Artificial Sequence: Synthetic oligonucleotide"
  source: /note="Description of Combined DNA/RNA Molecule: Synthetic oligonucleotide"
uauucuccgagcuucgcautt

SEQ ID NO: 885 - DNA, 21 bp, Artificial Sequence
  source: /note="Description of Artificial Sequence: Synthetic oligonucleotide"
  source: /note="Description of Combined DNA/RNA Molecule: Synthetic oligonucleotide"
auucuccgagcuucgcaautt

SEQ ID NO: 886 - DNA, 21 bp, Artificial Sequence
  source: /note="Description of Artificial Sequence: Synthetic oligonucleotide"
  source: /note="Description of Combined DNA/RNA Molecule: Synthetic oligonucleotide"
uucuccgagcuucgcaauutt

SEQ ID NO: 887 - DNA, 21 bp, Artificial Sequence
  source: /note="Description of Artificial Sequence: Synthetic oligonucleotide"
  source: /note="Description of Combined DNA/RNA Molecule: Synthetic oligonucleotide"
ucuccgagcuucgcaaugutt

SEQ ID NO: 888 - DNA, 21 bp, Artificial Sequence
  source: /note="Description of Artificial Sequence: Synthetic oligonucleotide"
  source: /note="Description of Combined DNA/RNA Molecule: Synthetic oligonucleotide"
cuccgagcuucgcaaugcutt

SEQ ID NO: 889 - DNA, 21 bp, Artificial Sequence
  source: /note="Description of Artificial Sequence: Synthetic oligonucleotide"
  source: /note="Description of Combined DNA/RNA Molecule: Synthetic oligonucleotide"
uccgagcuucgcaaugccutt

SEQ ID NO: 890 - DNA, 21 bp, Artificial Sequence
  source: /note="Description of Artificial Sequence: Synthetic oligonucleotide"
  source: /note="Description of Combined DNA/RNA Molecule: Synthetic oligonucleotide"
ccgagcuucgcaaugccgutt

SEQ ID NO: 891 - DNA, 21 bp, Artificial Sequence
  source: /note="Description of Artificial Sequence: Synthetic oligonucleotide"
  source: /note="Description of Combined DNA/RNA Molecule: Synthetic oligonucleotide"
cgagcuucgcaaugccgcutt

SEQ ID NO: 892 - DNA, 21 bp, Artificial Sequence
  source: /note="Description of Artificial Sequence: Synthetic oligonucleotide"
  source: /note="Description of Combined DNA/RNA Molecule: Synthetic oligonucleotide"
gagcuucgcaaugccgccutt

SEQ ID NO: 893 - DNA, 21 bp, Artificial Sequence
  source: /note="Description of Artificial Sequence: Synthetic oligonucleotide"
  source: /note="Description of Combined DNA/RNA Molecule: Synthetic oligonucleotide"
agcuucgcaaugccgccuutt

SEQ ID NO: 894 - DNA, 21 bp, Artificial Sequence
  source: /note="Description of Artificial Sequence: Synthetic oligonucleotide"
  source: /note="Description of Combined DNA/RNA Molecule: Synthetic oligonucleotide"
gcuucgcaaugccgccuautt

SEQ ID NO: 895 - DNA, 21 bp, Artificial Sequence
  source: /note="Description of Artificial Sequence: Synthetic oligonucleotide"
  source: /note="Description of Combined DNA/RNA Molecule: Synthetic oligonucleotide"
cuucgcaaugccgccuaautt

SEQ ID NO: 896 - DNA, 21 bp, Artificial Sequence
  source: /note="Description of Artificial Sequence: Synthetic oligonucleotide"
  source: /note="Description of Combined DNA/RNA Molecule: Synthetic oligonucleotide"
uucgcaaugccgccuaagutt

SEQ ID NO: 897 - DNA, 21 bp, Artificial Sequence
  source: /note="Description of Artificial Sequence: Synthetic oligonucleotide"
  source: /note="Description of Combined DNA/RNA Molecule: Synthetic oligonucleotide"
ucgcaaugccgccuaaggutt

SEQ ID NO: 898 - DNA, 21 bp, Artificial Sequence
  source: /note="Description of Artificial Sequence: Synthetic oligonucleotide"
  source: /note="Description of Combined DNA/RNA Molecule: Synthetic oligonucleotide"
cgcaaugccgccuaaggautt

SEQ ID NO: 899 - DNA, 21 bp, Artificial Sequence
  source: /note="Description of Artificial Sequence: Synthetic oligonucleotide"
  source: /note="Description of Combined DNA/RNA Molecule: Synthetic oligonucleotide"
gcaaugccgccuaaggacutt

SEQ ID NO: 900 - DNA, 21 bp, Artificial Sequence
  source: /note="Description of Artificial Sequence: Synthetic oligonucleotide"
  source: /note="Description of Combined DNA/RNA Molecule: Synthetic oligonucleotide"
caaugccgccuaaggacgutt

SEQ ID NO: 901 - DNA, 21 bp, Artificial Sequence
  source: /note="Description of Artificial Sequence: Synthetic oligonucleotide"
  source: /note="Description of Combined DNA/RNA Molecule: Synthetic oligonucleotide"
aaugccgccuaaggacgautt

SEQ ID NO: 902 - DNA, 21 bp, Artificial Sequence
  source: /note="Description of Artificial Sequence: Synthetic oligonucleotide"
  source: /note="Description of Combined DNA/RNA Molecule: Synthetic oligonucleotide"
augccgccuaaggacgacutt

SEQ ID NO: 903 - DNA, 21 bp, Artificial Sequence
  source: /note="Description of Artificial Sequence: Synthetic oligonucleotide"
  source: /note="Description of Combined DNA/RNA Molecule: Synthetic oligonucleotide"
ugccgccuaaggacgacautt

SEQ ID NO: 904 - DNA, 21 bp, Artificial Sequence
  source: /note="Description of Artificial Sequence: Synthetic oligonucleotide"
  source: /note="Description of Combined DNA/RNA Molecule: Synthetic oligonucleotide"
gccgccuaaggacgacaautt

SEQ ID NO: 905 - DNA, 21 bp, Artificial Sequence
  source: /note="Description of Artificial Sequence: Synthetic oligonucleotide"
  source: /note="Description of Combined DNA/RNA Molecule: Synthetic oligonucleotide"
ccgccuaaggacgacaagutt

SEQ ID NO: 906 - DNA, 21 bp, Artificial Sequence
  source: /note="Description of Artificial Sequence: Synthetic oligonucleotide"
  source: /note="Description of Combined DNA/RNA Molecule: Synthetic oligonucleotide"
cgccuaaggacgacaagautt

SEQ ID NO: 907 - DNA, 21 bp, Artificial Sequence
  source: /note="Description of Artificial Sequence: Synthetic oligonucleotide"
  source: /note="Description of Combined DNA/RNA Molecule: Synthetic oligonucleotide"
gccuaaggacgacaagaautt

SEQ ID NO: 908 - DNA, 21 bp, Artificial Sequence
  source: /note="Description of Artificial Sequence: Synthetic oligonucleotide"
  source: /note="Description of Combined DNA/RNA Molecule: Synthetic oligonucleotide"
ccuaaggacgacaagaagutt

SEQ ID NO: 909 - DNA, 21 bp, Artificial Sequence
  source: /note="Description of Artificial Sequence: Synthetic oligonucleotide"
  source: /note="Description of Combined DNA/RNA Molecule: Synthetic oligonucleotide"
cuaaggacgacaagaagautt

SEQ ID NO: 910 - DNA, 21 bp, Artificial Sequence
  source: /note="Description of Artificial Sequence: Synthetic oligonucleotide"
  source: /note="Description of Combined DNA/RNA Molecule: Synthetic oligonucleotide"
uaaggacgacaagaagaautt

SEQ ID NO: 911 - DNA, 21 bp, Artificial Sequence
  source: /note="Description of Artificial Sequence: Synthetic oligonucleotide"
  source: /note="Description of Combined DNA/RNA Molecule: Synthetic oligonucleotide"
aaggacgacaagaagaagutt

SEQ ID NO: 912 - DNA, 21 bp, Artificial Sequence
  source: /note="Description of Artificial Sequence: Synthetic oligonucleotide"
  source: /note="Description of Combined DNA/RNA Molecule: Synthetic oligonucleotide"
aggacgacaagaagaagautt

SEQ ID NO: 913 - DNA, 21 bp, Artificial Sequence
  source: /note="Description of Artificial Sequence: Synthetic oligonucleotide"
  source: /note="Description of Combined DNA/RNA Molecule: Synthetic oligonucleotide"
ggacgacaagaagaagaautt

SEQ ID NO: 914 - DNA, 21 bp, Artificial Sequence
  source: /note="Description of Artificial Sequence: Synthetic oligonucleotide"
  source: /note="Description of Combined DNA/RNA Molecule: Synthetic oligonucleotide"
gacgacaagaagaagaagutt

SEQ ID NO: 915 - DNA, 21 bp, Artificial Sequence
  source: /note="Description of Artificial Sequence: Synthetic oligonucleotide"
  source: /note="Description of Combined DNA/RNA Molecule: Synthetic oligonucleotide"
acgacaagaagaagaaggutt

SEQ ID NO: 916 - DNA, 21 bp, Artificial Sequence
  source: /note="Description of Artificial Sequence: Synthetic oligonucleotide"
  source: /note="Description of Combined DNA/RNA Molecule: Synthetic oligonucleotide"
cgacaagaagaagaaggautt

SEQ ID NO: 917 - DNA, 21 bp, Artificial Sequence
  source: /note="Description of Artificial Sequence: Synthetic oligonucleotide"
  source: /note="Description of Combined DNA/RNA Molecule: Synthetic oligonucleotide"
gacaagaagaagaaggacutt

SEQ ID NO: 918 - DNA, 21 bp, Artificial Sequence
  source: /note="Description of Artificial Sequence: Synthetic oligonucleotide"
  source: /note="Description of Combined DNA/RNA Molecule: Synthetic oligonucleotide"
acaagaagaagaaggacgutt

SEQ ID NO: 919 - DNA, 21 bp, Artificial Sequence
  source: /note="Description of Artificial Sequence: Synthetic oligonucleotide"
  source: /note="Description of Combined DNA/RNA Molecule: Synthetic oligonucleotide"
caagaagaagaaggacgcutt

SEQ ID NO: 920 - DNA, 21 bp, Artificial Sequence
  source: /note="Description of Artificial Sequence: Synthetic oligonucleotide"
  source: /note="Description of Combined DNA/RNA Molecule: Synthetic oligonucleotide"
aagaagaagaaggacgcuutt

SEQ ID NO: 921 - DNA, 21 bp, Artificial Sequence
  source: /note="Description of Artificial Sequence: Synthetic oligonucleotide"
  source: /note="Description of Combined DNA/RNA Molecule: Synthetic oligonucleotide"
agaagaagaaggacgcugutt

SEQ ID NO: 922 - DNA, 21 bp, Artificial Sequence
  source: /note="Description of Artificial Sequence: Synthetic oligonucleotide"
  source: /note="Description of Combined DNA/RNA Molecule: Synthetic oligonucleotide"
gaagaagaaggacgcuggutt

SEQ ID NO: 923 - DNA, 21 bp, Artificial Sequence
  source: /note="Description of Artificial Sequence: Synthetic oligonucleotide"
  source: /note="Description of Combined DNA/RNA Molecule: Synthetic oligonucleotide"
aagaagaaggacgcuggautt

SEQ ID NO: 924 - DNA, 21 bp, Artificial Sequence
  source: /note="Description of Artificial Sequence: Synthetic oligonucleotide"
  source: /note="Description of Combined DNA/RNA Molecule: Synthetic oligonucleotide"
agaagaaggacgcuggaautt

SEQ ID NO: 925 - DNA, 21 bp, Artificial Sequence
  source: /note="Description of Artificial Sequence: Synthetic oligonucleotide"
  source: /note="Description of Combined DNA/RNA Molecule: Synthetic oligonucleotide"
gaagaaggacgcuggaaautt

SEQ ID NO: 926 - DNA, 21 bp, Artificial Sequence
  source: /note="Description of Artificial Sequence: Synthetic oligonucleotide"
  source: /note="Description of Combined DNA/RNA Molecule: Synthetic oligonucleotide"
aagaaggacgcuggaaagutt

SEQ ID NO: 927 - DNA, 21 bp, Artificial Sequence
  source: /note="Description of Artificial Sequence: Synthetic oligonucleotide"
  source: /note="Description of Combined DNA/RNA Molecule: Synthetic oligonucleotide"
agaaggacgcuggaaaguutt

SEQ ID NO: 928 - DNA, 21 bp, Artificial Sequence
  source: /note="Description of Artificial Sequence: Synthetic oligonucleotide"
  source: /note="Description of Combined DNA/RNA Molecule: Synthetic oligonucleotide"
gaaggacgcuggaaagucutt

SEQ ID NO: 929 - DNA, 21 bp, Artificial Sequence
  source: /note="Description of Artificial Sequence: Synthetic oligonucleotide"
  source: /note="Description of Combined DNA/RNA Molecule: Synthetic oligonucleotide"
aaggacgcuggaaagucgutt

SEQ ID NO: 930 - DNA, 21 bp, Artificial Sequence
  source: /note="Description of Artificial Sequence: Synthetic oligonucleotide"
  source: /note="Description of Combined DNA/RNA Molecule: Synthetic oligonucleotide"
aggacgcuggaaagucggutt

SEQ ID NO: 931 - DNA, 21 bp, Artificial Sequence
  source: /note="Description of Artificial Sequence: Synthetic oligonucleotide"
  source: /note="Description of Combined DNA/RNA Molecule: Synthetic oligonucleotide"
ggacgcuggaaagucggcutt

SEQ ID NO: 932 - DNA, 21 bp, Artificial Sequence
  source: /note="Description of Artificial Sequence: Synthetic oligonucleotide"
  source: /note="Description of Combined DNA/RNA Molecule: Synthetic oligonucleotide"
gacgcuggaaagucggccutt

SEQ ID NO: 933 - DNA, 21 bp, Artificial Sequence
  source: /note="Description of Artificial Sequence: Synthetic oligonucleotide"
  source: /note="Description of Combined DNA/RNA Molecule: Synthetic oligonucleotide"
acgcuggaaagucggccautt

SEQ ID NO: 934 - DNA, 21 bp, Artificial Sequence
  source: /note="Description of Artificial Sequence: Synthetic oligonucleotide"
  source: /note="Description of Combined DNA/RNA Molecule: Synthetic oligonucleotide"
cgcuggaaagucggccaautt

SEQ ID NO: 935 - DNA, 21 bp, Artificial Sequence
  source: /note="Description of Artificial Sequence: Synthetic oligonucleotide"
  source: /note="Description of Combined DNA/RNA Molecule: Synthetic oligonucleotide"
gcuggaaagucggccaagutt

SEQ ID NO: 936 - DNA, 21 bp, Artificial Sequence
  source: /note="Description of Artificial Sequence: Synthetic oligonucleotide"
  source: /note="Description of Combined DNA/RNA Molecule: Synthetic oligonucleotide"
cuggaaagucggccaagautt

SEQ ID NO: 937 - DNA, 21 bp, Artificial Sequence
  source: /note="Description of Artificial Sequence: Synthetic oligonucleotide"
  source: /note="Description of Combined DNA/RNA Molecule: Synthetic oligonucleotide"
uggaaagucggccaagaautt

SEQ ID NO: 938 - DNA, 21 bp, Artificial Sequence
  source: /note="Description of Artificial Sequence: Synthetic oligonucleotide"
  source: /note="Description of Combined DNA/RNA Molecule: Synthetic oligonucleotide"
ggaaagucggccaagaaautt

SEQ ID NO: 939 - DNA, 21 bp, Artificial Sequence
  source: /note="Description of Artificial Sequence: Synthetic oligonucleotide"
  source: /note="Description of Combined DNA/RNA Molecule: Synthetic oligonucleotide"
gaaagucggccaagaaagutt

SEQ ID NO: 940 - DNA, 21 bp, Artificial Sequence
  source: /note="Description of Artificial Sequence: Synthetic oligonucleotide"
  source: /note="Description of Combined DNA/RNA Molecule: Synthetic oligonucleotide"
aaagucggccaagaaagautt

SEQ ID NO: 941 - DNA, 21 bp, Artificial Sequence
  source: /note="Description of Artificial Sequence: Synthetic oligonucleotide"
  source: /note="Description of Combined DNA/RNA Molecule: Synthetic oligonucleotide"
aagucggccaagaaagacutt

SEQ ID NO: 942 - DNA, 21 bp, Artificial Sequence
  source: /note="Description of Artificial Sequence: Synthetic oligonucleotide"
  source: /note="Description of Combined DNA/RNA Molecule: Synthetic oligonucleotide"
agucggccaagaaagacautt

SEQ ID NO: 943 - DNA, 21 bp, Artificial Sequence
  source: /note="Description of Artificial Sequence: Synthetic oligonucleotide"
  source: /note="Description of Combined DNA/RNA Molecule: Synthetic oligonucleotide"
gucggccaagaaagacaautt

SEQ ID NO: 944 - DNA, 21 bp, Artificial Sequence
  source: /note="Description of Artificial Sequence: Synthetic oligonucleotide"
  source: /note="Description of Combined DNA/RNA Molecule: Synthetic oligonucleotide"
ucggccaagaaagacaaautt

SEQ ID NO: 945 - DNA, 21 bp, Artificial Sequence
  source: /note="Description of Artificial Sequence: Synthetic oligonucleotide"
  source: /note="Description of Combined DNA/RNA Molecule: Synthetic oligonucleotide"
cggccaagaaagacaaagutt

SEQ ID NO: 946 - DNA, 21 bp, Artificial Sequence
  source: /note="Description of Artificial Sequence: Synthetic oligonucleotide"
  source: /note="Description of Combined DNA/RNA Molecule: Synthetic oligonucleotide"
ggccaagaaagacaaagautt

SEQ ID NO: 947 - DNA, 21 bp, Artificial Sequence
  source: /note="Description of Artificial Sequence: Synthetic oligonucleotide"
  source: /note="Description of Combined DNA/RNA Molecule: Synthetic oligonucleotide"
gccaagaaagacaaagacutt

SEQ ID NO: 948 - DNA, 21 bp, Artificial Sequence
  source: /note="Description of Artificial Sequence: Synthetic oligonucleotide"
  source: /note="Description of Combined DNA/RNA Molecule: Synthetic oligonucleotide"
ccaagaaagacaaagaccutt

SEQ ID NO: 949 - DNA, 21 bp, Artificial Sequence
  source: /note="Description of Artificial Sequence: Synthetic oligonucleotide"
  source: /note="Description of Combined DNA/RNA Molecule: Synthetic oligonucleotide"
caagaaagacaaagacccutt

SEQ ID NO: 950 - DNA, 21 bp, Artificial Sequence
  source: /note="Description of Artificial Sequence: Synthetic oligonucleotide"
  source: /note="Description of Combined DNA/RNA Molecule: Synthetic oligonucleotide"
agaaagacaaagacccagutt

SEQ ID NO: 951 - DNA, 21 bp, Artificial Sequence
  source: /note="Description of Artificial Sequence: Synthetic oligonucleotide"
  source: /note="Description of Combined DNA/RNA Molecule: Synthetic oligonucleotide"
gaaagacaaagacccaguutt

SEQ ID NO: 952 - DNA, 21 bp, Artificial Sequence
  source: /note="Description of Artificial Sequence: Synthetic oligonucleotide"
  source: /note="Description of Combined DNA/RNA Molecule: Synthetic oligonucleotide"
aaagacaaagacccagugutt

SEQ ID NO: 953 - DNA, 21 bp, Artificial Sequence
  source: /note="Description of Artificial Sequence: Synthetic oligonucleotide"
  source: /note="Description of Combined DNA/RNA Molecule: Synthetic oligonucleotide"
aagacaaagacccagugautt

SEQ ID NO: 954 - DNA, 21 bp, Artificial Sequence
  source: /note="Description of Artificial Sequence: Synthetic oligonucleotide"
  source: /note="Description of Combined DNA/RNA Molecule: Synthetic oligonucleotide"
agacaaagacccagugaautt

SEQ ID NO: 955 - DNA, 21 bp, Artificial Sequence
  source: /note="Description of Artificial Sequence: Synthetic oligonucleotide"
  source: /note="Description of Combined DNA/RNA Molecule: Synthetic oligonucleotide"
gacaaagacccagugaacutt

SEQ ID NO: 956 - DNA, 21 bp, Artificial Sequence
  source: /note="Description of Artificial Sequence: Synthetic oligonucleotide"
  source: /note="Description of Combined DNA/RNA Molecule: Synthetic oligonucleotide"
acaaagacccagugaacautt

SEQ ID NO: 957 - DNA, 21 bp, Artificial Sequence
  source: /note="Description of Artificial Sequence: Synthetic oligonucleotide"
  source: /note="Description of Combined DNA/RNA Molecule: Synthetic oligonucleotide"
caaagacccagugaacaautt

SEQ ID NO: 958 - DNA, 21 bp, Artificial Sequence
  source: /note="Description of Artificial Sequence: Synthetic oligonucleotide"
  source: /note="Description of Combined DNA/RNA Molecule: Synthetic oligonucleotide"
aaagacccagugaacaaautt

SEQ ID NO: 959 - DNA, 21 bp, Artificial Sequence
  source: /note="Description of Artificial Sequence: Synthetic oligonucleotide"
  source: /note="Description of Combined DNA/RNA Molecule: Synthetic oligonucleotide"
aagacccagugaacaaauutt

SEQ ID NO: 960 - DNA, 21 bp, Artificial Sequence
  source: /note="Description of Artificial Sequence: Synthetic oligonucleotide"
  source: /note="Description of Combined DNA/RNA Molecule: Synthetic oligonucleotide"
agacccagugaacaaaucutt

SEQ ID NO: 961 - DNA, 21 bp, Artificial Sequence
  source: /note="Description of Artificial Sequence: Synthetic oligonucleotide"
  source: /note="Description of Combined DNA/RNA Molecule: Synthetic oligonucleotide"
gacccagugaacaaauccutt

SEQ ID NO: 962 - DNA, 21 bp, Artificial Sequence
  source: /note="Description of Artificial Sequence: Synthetic oligonucleotide"
  source: /note="Description of Combined DNA/RNA Molecule: Synthetic oligonucleotide"
acccagugaacaaauccgutt

SEQ ID NO: 963 - DNA, 21 bp, Artificial Sequence
  source: /note="Description of Artificial Sequence: Synthetic oligonucleotide"
  source: /note="Description of Combined DNA/RNA Molecule: Synthetic oligonucleotide"
cccagugaacaaauccggutt

SEQ ID NO: 964 - DNA, 21 bp, Artificial Sequence
  source: /note="Description of Artificial Sequence: Synthetic oligonucleotide"
  source: /note="Description of Combined DNA/RNA Molecule: Synthetic oligonucleotide"
gggcaaggccaaaaagaautt

SEQ ID NO: 965 - DNA, 21 bp, Artificial Sequence
  source: /note="Description of Artificial Sequence: Synthetic oligonucleotide"
  source: /note="Description of Combined DNA/RNA Molecule: Synthetic oligonucleotide"
ggcaaggccaaaaagaagutt

SEQ ID NO: 966 - DNA, 21 bp, Artificial Sequence
  source: /note="Description of Artificial Sequence: Synthetic oligonucleotide"
  source: /note="Description of Combined DNA/RNA Molecule: Synthetic oligonucleotide"
gcaaggccaaaaagaagautt

SEQ ID NO: 967 - DNA, 21 bp, Artificial Sequence
  source: /note="Description of Artificial Sequence: Synthetic oligonucleotide"
  source: /note="Description of Combined DNA/RNA Molecule: Synthetic oligonucleotide"
aggccaaaaagaagaaguutt

SEQ ID NO: 968 - DNA, 21 bp, Artificial Sequence
  source: /note="Description of Artificial Sequence: Synthetic oligonucleotide"
  source: /note="Description of Combined DNA/RNA Molecule: Synthetic oligonucleotide"
ggccaaaaagaagaagugutt

SEQ ID NO: 969 - DNA, 21 bp, Artificial Sequence
  source: /note="Description of Artificial Sequence: Synthetic oligonucleotide"
  source: /note="Description of Combined DNA/RNA Molecule: Synthetic oligonucleotide"
gccaaaaagaagaaguggutt

SEQ ID NO: 970 - DNA, 21 bp, Artificial Sequence
  source: /note="Description of Artificial Sequence: Synthetic oligonucleotide"
  source: /note="Description of Combined DNA/RNA Molecule: Synthetic oligonucleotide"
ccaaaaagaagaagugguutt

SEQ ID NO: 971 - DNA, 21 bp, Artificial Sequence
  source: /note="Description of Artificial Sequence: Synthetic oligonucleotide"
  source: /note="Description of Combined DNA/RNA Molecule: Synthetic oligonucleotide"
caaaaagaagaaguggucutt

SEQ ID NO: 972 - DNA, 21 bp, Artificial Sequence
  source: /note="Description of Artificial Sequence: Synthetic oligonucleotide"
  source: /note="Description of Combined DNA/RNA Molecule: Synthetic oligonucleotide"
aaaaagaagaagugguccutt

SEQ ID NO: 973 - DNA, 21 bp, Artificial Sequence
  source: /note="Description of Artificial Sequence: Synthetic oligonucleotide"
  source: /note="Description of Combined DNA/RNA Molecule: Synthetic oligonucleotide"
aaaagaagaagugguccautt

SEQ ID NO: 974 - DNA, 21 bp, Artificial Sequence
  source: /note="Description of Artificial Sequence: Synthetic oligonucleotide"
  source: /note="Description of Combined DNA/RNA Molecule: Synthetic oligonucleotide"
aaagaagaagugguccaautt

SEQ ID NO: 975 - DNA, 21 bp, Artificial Sequence
  source: /note="Description of Artificial Sequence: Synthetic oligonucleotide"
  source: /note="Description of Combined DNA/RNA Molecule: Synthetic oligonucleotide"
aagaagaagugguccaaautt

SEQ ID NO: 976 - DNA, 21 bp, Artificial Sequence
  source: /note="Description of Artificial Sequence: Synthetic oligonucleotide"
  source: /note="Description of Combined DNA/RNA Molecule: Synthetic oligonucleotide"
agaagaagugguccaaagutt

SEQ ID NO: 977 - DNA, 21 bp, Artificial Sequence
  source: /note="Description of Artificial Sequence: Synthetic oligonucleotide"
  source: /note="Description of Combined DNA/RNA Molecule: Synthetic oligonucleotide"
gaagaagugguccaaaggutt

SEQ ID NO: 978 - DNA, 21 bp, Artificial Sequence
  source: /note="Description of Artificial Sequence: Synthetic oligonucleotide"
  source: /note="Description of Combined DNA/RNA Molecule: Synthetic oligonucleotide"
aagaagugguccaaaggcutt

SEQ ID NO: 979 - DNA, 21 bp, Artificial Sequence
  source: /note="Description of Artificial Sequence: Synthetic oligonucleotide"
  source: /note="Description of Combined DNA/RNA Molecule: Synthetic oligonucleotide"
agaagugguccaaaggcautt

SEQ ID NO: 980 - DNA, 21 bp, Artificial Sequence
  source: /note="Description of Artificial Sequence: Synthetic oligonucleotide"
  source: /note="Description of Combined DNA/RNA Molecule: Synthetic oligonucleotide"
gaagugguccaaaggcaautt

SEQ ID NO: 981 - DNA, 21 bp, Artificial Sequence
  source: /note="Description of Artificial Sequence: Synthetic oligonucleotide"
  source: /note="Description of Combined DNA/RNA Molecule: Synthetic oligonucleotide"
aagugguccaaaggcaaautt

SEQ ID NO: 982 - DNA, 21 bp, Artificial Sequence
  source: /note="Description of Artificial Sequence: Synthetic oligonucleotide"
  source: /note="Description of Combined DNA/RNA Molecule: Synthetic oligonucleotide"
agugguccaaaggcaaagutt

SEQ ID NO: 983 - DNA, 21 bp, Artificial Sequence
  source: /note="Description of Artificial Sequence: Synthetic oligonucleotide"
  source: /note="Description of Combined DNA/RNA Molecule: Synthetic oligonucleotide"
gugguccaaaggcaaaguutt

SEQ ID NO: 984 - DNA, 21 bp, Artificial Sequence
  source: /note="Description of Artificial Sequence: Synthetic oligonucleotide"
  source: /note="Description of Combined DNA/RNA Molecule: Synthetic oligonucleotide"
ugguccaaaggcaaaguuutt

SEQ ID NO: 985 - DNA, 21 bp, Artificial Sequence
  source: /note="Description of Artificial Sequence: Synthetic oligonucleotide"
  source: /note="Description of Combined DNA/RNA Molecule: Synthetic oligonucleotide"
gguccaaaggcaaaguucutt

SEQ ID NO: 986 - DNA, 21 bp, Artificial Sequence
  source: /note="Description of Artificial Sequence: Synthetic oligonucleotide"
  source: /note="Description of Combined DNA/RNA Molecule: Synthetic oligonucleotide"
guccaaaggcaaaguucgutt

SEQ ID NO: 987 - DNA, 21 bp, Artificial Sequence
  source: /note="Description of Artificial Sequence: Synthetic oligonucleotide"
  source: /note="Description of Combined DNA/RNA Molecule: Synthetic oligonucleotide"
uccaaaggcaaaguucggutt

SEQ ID NO: 988 - DNA, 21 bp, Artificial Sequence
  source: /note="Description of Artificial Sequence: Synthetic oligonucleotide"
  source: /note="Description of Combined DNA/RNA Molecule: Synthetic oligonucleotide"
ccaaaggcaaaguucgggutt

SEQ ID NO: 989 - DNA, 21 bp, Artificial Sequence
  source: /note="Description of Artificial Sequence: Synthetic oligonucleotide"
  source: /note="Description of Combined DNA/RNA Molecule: Synthetic oligonucleotide"
caaaggcaaaguucgggautt

SEQ ID NO: 990 - DNA, 21 bp, Artificial Sequence
  source: /note="Description of Artificial Sequence: Synthetic oligonucleotide"
  source: /note="Description of Combined DNA/RNA Molecule: Synthetic oligonucleotide"
aaaggcaaaguucgggacutt

SEQ ID NO: 991 - DNA, 21 bp, Artificial Sequence
  source: /note="Description of Artificial Sequence: Synthetic oligonucleotide"
  source: /note="Description of Combined DNA/RNA Molecule: Synthetic oligonucleotide"
aaggcaaaguucgggacautt

SEQ ID NO: 992 - DNA, 21 bp, Artificial Sequence
  source: /note="Description of Artificial Sequence: Synthetic oligonucleotide"
  source: /note="Description of Combined DNA/RNA Molecule: Synthetic oligonucleotide"
aggcaaaguucgggacaautt

SEQ ID NO: 993 - DNA, 21 bp, Artificial Sequence
  source: /note="Description of Artificial Sequence: Synthetic oligonucleotide"
  source: /note="Description of Combined DNA/RNA Molecule: Synthetic oligonucleotide"
ggcaaaguucgggacaagutt

SEQ ID NO: 994 - DNA, 21 bp, Artificial Sequence
  source: /note="Description of Artificial Sequence: Synthetic oligonucleotide"
  source: /note="Description of Combined DNA/RNA Molecule: Synthetic oligonucleotide"
gcaaaguucgggacaagcutt

SEQ ID NO: 995 - DNA, 21 bp, Artificial Sequence
  source: /note="Description of Artificial Sequence: Synthetic oligonucleotide"
  source: /note="Description of Combined DNA/RNA Molecule: Synthetic oligonucleotide"
caaaguucgggacaagcuutt

SEQ ID NO: 996 - DNA, 21 bp, Artificial Sequence
  source: /note="Description of Artificial Sequence: Synthetic oligonucleotide"
  source: /note="Description of Combined DNA/RNA Molecule: Synthetic oligonucleotide"
aaaguucgggacaagcucutt

SEQ ID NO: 997 - DNA, 21 bp, Artificial Sequence
  source: /note="Description of Artificial Sequence: Synthetic oligonucleotide"
  source: /note="Description of Combined DNA/RNA Molecule: Synthetic oligonucleotide"
aaguucgggacaagcucautt

SEQ ID NO: 998 - DNA, 21 bp, Artificial Sequence
  source: /note="Description of Artificial Sequence: Synthetic oligonucleotide"
  source: /note="Description of Combined DNA/RNA Molecule: Synthetic oligonucleotide"
aguucgggacaagcucaautt

SEQ ID NO: 999 - DNA, 21 bp, Artificial Sequence
  source: /note="Description of Artificial Sequence: Synthetic oligonucleotide"
  source: /note="Description of Combined DNA/RNA Molecule: Synthetic oligonucleotide"
guucgggacaagcucaauutt

SEQ ID NO: 1000 - DNA, 21 bp, Artificial Sequence
  source: /note="Description of Artificial Sequence: Synthetic oligonucleotide"
  source: /note="Description of Combined DNA/RNA Molecule: Synthetic oligonucleotide"
uucgggacaagcucaauautt

SEQ ID NO: 1001 - DNA, 21 bp, Artificial Sequence
  source: /note="Description of Artificial Sequence: Synthetic oligonucleotide"
  source: /note="Description of Combined DNA/RNA Molecule: Synthetic oligonucleotide"
ucgggacaagcucaauaautt

SEQ ID NO: 1002 - DNA, 21 bp, Artificial Sequence
  source: /note="Description of Artificial Sequence: Synthetic oligonucleotide"
  source: /note="Description of Combined DNA/RNA Molecule: Synthetic oligonucleotide"
cgggacaagcucaauaacutt

SEQ ID NO: 1003 - DNA, 21 bp, Artificial Sequence
  source: /note="Description of Artificial Sequence: Synthetic oligonucleotide"
  source: /note="Description of Combined DNA/RNA Molecule: Synthetic oligonucleotide"
gggacaagcucaauaacuutt

SEQ ID NO: 1004 - DNA, 21 bp, Artificial Sequence
  source: /note="Description of Artificial Sequence: Synthetic oligonucleotide"
  source: /note="Description of Combined DNA/RNA Molecule: Synthetic oligonucleotide"
ggacaagcucaauaacuuutt

SEQ ID NO: 1005 - DNA, 21 bp, Artificial Sequence
  source: /note="Description of Artificial Sequence: Synthetic oligonucleotide"
  source: /note="Description of Combined DNA/RNA Molecule: Synthetic oligonucleotide"
gacaagcucaauaacuuautt

SEQ ID NO: 1006 - DNA, 21 bp, Artificial Sequence
  source: /note="Description of Artificial Sequence: Synthetic oligonucleotide"
  source: /note="Description of Combined DNA/RNA Molecule: Synthetic oligonucleotide"
acaagcucaauaacuuagutt

SEQ ID NO: 1007 - DNA, 21 bp, Artificial Sequence
  source: /note="Description of Artificial Sequence: Synthetic oligonucleotide"
  source: /note="Description of Combined DNA/RNA Molecule: Synthetic oligonucleotide"
caagcucaauaacuuaguutt

SEQ ID NO: 1008 - DNA, 21 bp, Artificial Sequence
  source: /note="Description of Artificial Sequence: Synthetic oligonucleotide"
  source: /note="Description of Combined DNA/RNA Molecule: Synthetic oligonucleotide"
aagcucaauaacuuagucutt

SEQ ID NO: 1009 - DNA, 21 bp, Artificial Sequence
  source: /note="Description of Artificial Sequence: Synthetic oligonucleotide"
  source: /note="Description of Combined DNA/RNA Molecule: Synthetic oligonucleotide"
agcucaauaacuuagucuutt

SEQ ID NO: 1010 - DNA, 21 bp, Artificial Sequence
  source: /note="Description of Artificial Sequence: Synthetic oligonucleotide"
  source: /note="Description of Combined DNA/RNA Molecule: Synthetic oligonucleotide"
gcucaauaacuuagucuuutt

SEQ ID NO: 1011 - DNA, 21 bp, Artificial Sequence
  source: /note="Description of Artificial Sequence: Synthetic oligonucleotide"
  source: /note="Description of Combined DNA/RNA Molecule: Synthetic oligonucleotide"
cucaauaacuuagucuugutt

SEQ ID NO: 1012 - DNA, 21 bp, Artificial Sequence
  source: /note="Description of Artificial Sequence: Synthetic oligonucleotide"
  source: /note="Description of Combined DNA/RNA Molecule: Synthetic oligonucleotide"
ucaauaacuuagucuuguutt

SEQ ID NO: 1013 - DNA, 21 bp, Artificial Sequence
  source: /note="Description of Artificial Sequence: Synthetic oligonucleotide"
  source: /note="Description of Combined DNA/RNA Molecule: Synthetic oligonucleotide"
caauaacuuagucuuguuutt

SEQ ID NO: 1014 - DNA, 21 bp, Artificial Sequence
  source: /note="Description of Artificial Sequence: Synthetic oligonucleotide"
  source: /note="Description of Combined DNA/RNA Molecule: Synthetic oligonucleotide"
aauaacuuagucuuguuuutt

SEQ ID NO: 1015 - DNA, 21 bp, Artificial Sequence
  source: /note="Description of Artificial Sequence: Synthetic oligonucleotide"
  source: /note="Description of Combined DNA/RNA Molecule: Synthetic oligonucleotide"
auaacuuagucuuguuugutt

SEQ ID NO: 1016 - DNA, 21 bp, Artificial Sequence
  source: /note="Description of Artificial Sequence: Synthetic oligonucleotide"
  source: /note="Description of Combined DNA/RNA Molecule: Synthetic oligonucleotide"
uaacuuagucuuguuugautt

SEQ ID NO: 1017 - DNA, 21 bp, Artificial Sequence
  source: /note="Description of Artificial Sequence: Synthetic oligonucleotide"
  source: /note="Description of Combined DNA/RNA Molecule: Synthetic oligonucleotide"
aacuuagucuuguuugacutt

SEQ ID NO: 1018 - DNA, 21 bp, Artificial Sequence
  source: /note="Description of Artificial Sequence: Synthetic oligonucleotide"
  source: /note="Description of Combined DNA/RNA Molecule: Synthetic oligonucleotide"
acuuagucuuguuugacautt

SEQ ID NO: 1019 - DNA, 21 bp, Artificial Sequence
  source: /note="Description of Artificial Sequence: Synthetic oligonucleotide"
  source: /note="Description of Combined DNA/RNA Molecule: Synthetic oligonucleotide"
cuuagucuuguuugacaautt

SEQ ID NO: 1020 - DNA, 21 bp, Artificial Sequence
  source: /note="Description of Artificial Sequence: Synthetic oligonucleotide"
  source: /note="Description of Combined DNA/RNA Molecule: Synthetic oligonucleotide"
uuagucuuguuugacaaautt

SEQ ID NO: 1021 - DNA, 21 bp, Artificial Sequence
  source: /note="Description of Artificial Sequence: Synthetic oligonucleotide"
  source: /note="Description of Combined DNA/RNA Molecule: Synthetic oligonucleotide"
uagucuuguuugacaaagutt

SEQ ID NO: 1022 - DNA, 21 bp, Artificial Sequence
  source: /note="Description of Artificial Sequence: Synthetic oligonucleotide"
  source: /note="Description of Combined DNA/RNA Molecule: Synthetic oligonucleotide"
agucuuguuugacaaagcutt

SEQ ID NO: 1023 - DNA, 21 bp, Artificial Sequence
  source: /note="Description of Artificial Sequence: Synthetic oligonucleotide"
  source: /note="Description of Combined DNA/RNA Molecule: Synthetic oligonucleotide"
gucuuguuugacaaagcuutt

SEQ ID NO: 1024 - DNA, 21 bp, Artificial Sequence
  source: /note="Description of Artificial Sequence: Synthetic oligonucleotide"
  source: /note="Description of Combined DNA/RNA Molecule: Synthetic oligonucleotide"
ucuuguuugacaaagcuautt

SEQ ID NO: 1025 - DNA, 21 bp, Artificial Sequence
  source: /note="Description of Artificial Sequence: Synthetic oligonucleotide"
  source: /note="Description of Combined DNA/RNA Molecule: Synthetic oligonucleotide"
cuuguuugacaaagcuacutt

SEQ ID NO: 1026 - DNA, 21 bp, Artificial Sequence
  source: /note="Description of Artificial Sequence: Synthetic oligonucleotide"
  source: /note="Description of Combined DNA/RNA Molecule: Synthetic oligonucleotide"
uuguuugacaaagcuaccutt

SEQ ID NO: 1027 - DNA, 21 bp, Artificial Sequence
  source: /note="Description of Artificial Sequence: Synthetic oligonucleotide"
  source: /note="Description of Combined DNA/RNA Molecule: Synthetic oligonucleotide"
uguuugacaaagcuaccuutt

SEQ ID NO: 1028 - DNA, 21 bp, Artificial Sequence
  source: /note="Description of Artificial Sequence: Synthetic oligonucleotide"
  source: /note="Description of Combined DNA/RNA Molecule: Synthetic oligonucleotide"
guuugacaaagcuaccuautt

SEQ ID NO: 1029 - DNA, 21 bp, Artificial Sequence
  source: /note="Description of Artificial Sequence: Synthetic oligonucleotide"
  source: /note="Description of Combined DNA/RNA Molecule: Synthetic oligonucleotide"
uuugacaaagcuaccuauutt

SEQ ID NO: 1030 - DNA, 21 bp, Artificial Sequence
  source: /note="Description of Artificial Sequence: Synthetic oligonucleotide"
  source: /note="Description of Combined DNA/RNA Molecule: Synthetic oligonucleotide"
uugacaaagcuaccuaugutt

SEQ ID NO: 1031 - DNA, 21 bp, Artificial Sequence
  source: /note="Description of Artificial Sequence: Synthetic oligonucleotide"
  source: /note="Description of Combined DNA/RNA Molecule: Synthetic oligonucleotide"
ugacaaagcuaccuaugautt

SEQ ID NO: 1032 - DNA, 21 bp, Artificial Sequence
  source: /note="Description of Artificial Sequence: Synthetic oligonucleotide"
  source: /note="Description of Combined DNA/RNA Molecule: Synthetic oligonucleotide"
gacaaagcuaccuaugauutt

SEQ ID NO: 1033 - DNA, 21 bp, Artificial Sequence
  source: /note="Description of Artificial Sequence: Synthetic oligonucleotide"
  source: /note="Description of Combined DNA/RNA Molecule: Synthetic oligonucleotide"
acaaagcuaccuaugauautt

SEQ ID NO: 1034 - DNA, 21 bp, Artificial Sequence
  source: /note="Description of Artificial Sequence: Synthetic oligonucleotide"
  source: /note="Description of Combined DNA/RNA Molecule: Synthetic oligonucleotide"
caaagcuaccuaugauaautt

SEQ ID NO: 1035 - DNA, 21 bp, Artificial Sequence
  source: /note="Description of Artificial Sequence: Synthetic oligonucleotide"
  source: /note="Description of Combined DNA/RNA Molecule: Synthetic oligonucleotide"
aaagcuaccuaugauaaautt

SEQ ID NO: 1036 - DNA, 21 bp, Artificial Sequence
  source: /note="Description of Artificial Sequence: Synthetic oligonucleotide"
  source: /note="Description of Combined DNA/RNA Molecule: Synthetic oligonucleotide"
aagcuaccuaugauaaacutt

SEQ ID NO: 1037 - DNA, 21 bp, Artificial Sequence
  source: /note="Description of Artificial Sequence: Synthetic oligonucleotide"
  source: /note="Description of Combined DNA/RNA Molecule: Synthetic oligonucleotide"
agcuaccuaugauaaacuutt

SEQ ID NO: 1038 - DNA, 21 bp, Artificial Sequence
  source: /note="Description of Artificial Sequence: Synthetic oligonucleotide"
  source: /note="Description of Combined DNA/RNA Molecule: Synthetic oligonucleotide"
gcuaccuaugauaaacucutt

SEQ ID NO: 1039 - DNA, 21 bp, Artificial Sequence
  source: /note="Description of Artificial Sequence: Synthetic oligonucleotide"
  source: /note="Description of Combined DNA/RNA Molecule: Synthetic oligonucleotide"
cuaccuaugauaaacucuutt

SEQ ID NO: 1040 - DNA, 21 bp, Artificial Sequence
  source: /note="Description of Artificial Sequence: Synthetic oligonucleotide"
  source: /note="Description of Combined DNA/RNA Molecule: Synthetic oligonucleotide"
uaccuaugauaaacucugutt

SEQ ID NO: 1041 - DNA, 21 bp, Artificial Sequence
  source: /note="Description of Artificial Sequence: Synthetic oligonucleotide"
  source: /note="Description of Combined DNA/RNA Molecule: Synthetic oligonucleotide"
accuaugauaaacucuguutt

SEQ ID NO: 1042 - DNA, 21 bp, Artificial Sequence
  source: /note="Description of Artificial Sequence: Synthetic oligonucleotide"
  source: /note="Description of Combined DNA/RNA Molecule: Synthetic oligonucleotide"
ccuaugauaaacucuguautt

SEQ ID NO: 1043 - DNA, 21 bp, Artificial Sequence
  source: /note="Description of Artificial Sequence: Synthetic oligonucleotide"
  source: /note="Description of Combined DNA/RNA Molecule: Synthetic oligonucleotide"
cuaugauaaacucuguaautt

SEQ ID NO: 1044 - DNA, 21 bp, Artificial Sequence
  source: /note="Description of Artificial Sequence: Synthetic oligonucleotide"
  source: /note="Description of Combined DNA/RNA Molecule: Synthetic oligonucleotide"
uaugauaaacucuguaagutt

SEQ ID NO: 1045 - DNA, 21 bp, Artificial Sequence
  source: /note="Description of Artificial Sequence: Synthetic oligonucleotide"
  source: /note="Description of Combined DNA/RNA Molecule: Synthetic oligonucleotide"
augauaaacucuguaaggutt

SEQ ID NO: 1046 - DNA, 21 bp, Artificial Sequence
  source: /note="Description of Artificial Sequence: Synthetic oligonucleotide"
  source: /note="Description of Combined DNA/RNA Molecule: Synthetic oligonucleotide"
ugauaaacucuguaaggautt

SEQ ID NO: 1047 - DNA, 21 bp, Artificial Sequence
  source: /note="Description of Artificial Sequence: Synthetic oligonucleotide"
  source: /note="Description of Combined DNA/RNA Molecule: Synthetic oligonucleotide"
gauaaacucuguaaggaautt

SEQ ID NO: 1048 - DNA, 21 bp, Artificial Sequence
  source: /note="Description of Artificial Sequence: Synthetic oligonucleotide"
  source: /note="Description of Combined DNA/RNA Molecule: Synthetic oligonucleotide"
auaaacucuguaaggaagutt

SEQ ID NO: 1049 - DNA, 21 bp, Artificial Sequence
  source: /note="Description of Artificial Sequence: Synthetic oligonucleotide"
  source: /note="Description of Combined DNA/RNA Molecule: Synthetic oligonucleotide"
uaaacucuguaaggaaguutt

SEQ ID NO: 1050 - DNA, 21 bp, Artificial Sequence
  source: /note="Description of Artificial Sequence: Synthetic oligonucleotide"
  source: /note="Description of Combined DNA/RNA Molecule: Synthetic oligonucleotide"
aaacucuguaaggaaguuutt

SEQ ID NO: 1051 - DNA, 21 bp, Artificial Sequence
  source: /note="Description of Artificial Sequence: Synthetic oligonucleotide"
  source: /note="Description of Combined DNA/RNA Molecule: Synthetic oligonucleotide"
aacucuguaaggaaguucutt

SEQ ID NO: 1052 - DNA, 21 bp, Artificial Sequence
  source: /note="Description of Artificial Sequence: Synthetic oligonucleotide"
  source: /note="Description of Combined DNA/RNA Molecule: Synthetic oligonucleotide"
acucuguaaggaaguuccutt

SEQ ID NO: 1053 - DNA, 21 bp, Artificial Sequence
  source: /note="Description of Artificial Sequence: Synthetic oligonucleotide"
  source: /note="Description of Combined DNA/RNA Molecule: Synthetic oligonucleotide"
cucuguaaggaaguucccutt

SEQ ID NO: 1054 - DNA, 21 bp, Artificial Sequence
  source: /note="Description of Artificial Sequence: Synthetic oligonucleotide"
  source: /note="Description of Combined DNA/RNA Molecule: Synthetic oligonucleotide"
ucuguaaggaaguucccautt

SEQ ID NO: 1055 - DNA, 21 bp, Artificial Sequence
  source: /note="Description of Artificial Sequence: Synthetic oligonucleotide"
  source: /note="Description of Combined DNA/RNA Molecule: Synthetic oligonucleotide"
cuguaaggaaguucccaautt

SEQ ID NO: 1056 - DNA, 21 bp, Artificial Sequence
  source: /note="Description of Artificial Sequence: Synthetic oligonucleotide"
  source: /note="Description of Combined DNA/RNA Molecule: Synthetic oligonucleotide"
uguaaggaaguucccaacutt

SEQ ID NO: 1057 - DNA, 21 bp, Artificial Sequence
  source: /note="Description of Artificial Sequence: Synthetic oligonucleotide"
  source: /note="Description of Combined DNA/RNA Molecule: Synthetic oligonucleotide"
guaaggaaguucccaacuutt

SEQ ID NO: 1058 - DNA, 21 bp, Artificial Sequence
  source: /note="Description of Artificial Sequence: Synthetic oligonucleotide"
  source: /note="Description of Combined DNA/RNA Molecule: Synthetic oligonucleotide"
uaaggaaguucccaacuautt

SEQ ID NO: 1059 - DNA, 21 bp, Artificial Sequence
  source: /note="Description of Artificial Sequence: Synthetic oligonucleotide"
  source: /note="Description of Combined DNA/RNA Molecule: Synthetic oligonucleotide"
aaggaaguucccaacuauutt

SEQ ID NO: 1060 - DNA, 21 bp, Artificial Sequence
  source: /note="Description of Artificial Sequence: Synthetic oligonucleotide"
  source: /note="Description of Combined DNA/RNA Molecule: Synthetic oligonucleotide"
aggaaguucccaacuauautt

SEQ ID NO: 1061 - DNA, 21 bp, Artificial Sequence
  source: /note="Description of Artificial Sequence: Synthetic oligonucleotide"
  source: /note="Description of Combined DNA/RNA Molecule: Synthetic oligonucleotide"
ggaaguucccaacuauaautt

SEQ ID NO: 1062 - DNA, 21 bp, Artificial Sequence
  source: /note="Description of Artificial Sequence: Synthetic oligonucleotide"
  source: /note="Description of Combined DNA/RNA Molecule: Synthetic oligonucleotide"
gaaguucccaacuauaaautt

SEQ ID NO: 1063 - DNA, 21 bp, Artificial Sequence
  source: /note="Description of Artificial Sequence: Synthetic oligonucleotide"
  source: /note="Description of Combined DNA/RNA Molecule: Synthetic oligonucleotide"
aaguucccaacuauaaacutt

SEQ ID NO: 1064 - DNA, 21 bp, Artificial Sequence
  source: /note="Description of Artificial Sequence: Synthetic oligonucleotide"
  source: /note="Description of Combined DNA/RNA Molecule: Synthetic oligonucleotide"
aguucccaacuauaaacuutt

SEQ ID NO: 1065 - DNA, 21 bp, Artificial Sequence
  source: /note="Description of Artificial Sequence: Synthetic oligonucleotide"
  source: /note="Description of Combined DNA/RNA Molecule: Synthetic oligonucleotide"
guucccaacuauaaacuuutt

SEQ ID NO: 1066 - DNA, 21 bp, Artificial Sequence
  source: /note="Description of Artificial Sequence: Synthetic oligonucleotide"
  source: /note="Description of Combined DNA/RNA Molecule: Synthetic oligonucleotide"
uucccaacuauaaacuuautt

SEQ ID NO: 1067 - DNA, 21 bp, Artificial Sequence
  source: /note="Description of Artificial Sequence: Synthetic oligonucleotide"
  source: /note="Description of Combined DNA/RNA Molecule: Synthetic oligonucleotide"
ucccaacuauaaacuuauutt

SEQ ID NO: 1068 - DNA, 21 bp, Artificial Sequence
  source: /note="Description of Artificial Sequence: Synthetic oligonucleotide"
  source: /note="Description of Combined DNA/RNA Molecule: Synthetic oligonucleotide"
cccaacuauaaacuuauautt

SEQ ID NO: 1069 - DNA, 21 bp, Artificial Sequence
  source: /note="Description of Artificial Sequence: Synthetic oligonucleotide"
  source: /note="Description of Combined DNA/RNA Molecule: Synthetic oligonucleotide"
ccaacuauaaacuuauaautt

SEQ ID NO: 1070 - DNA, 21 bp, Artificial Sequence
  source: /note="Description of Artificial Sequence: Synthetic oligonucleotide"
  source: /note="Description of Combined DNA/RNA Molecule: Synthetic oligonucleotide"
caacuauaaacuuauaacutt

SEQ ID NO: 1071 - DNA, 21 bp, Artificial Sequence
  source: /note="Description of Artificial Sequence: Synthetic oligonucleotide"
  source: /note="Description of Combined DNA/RNA Molecule: Synthetic oligonucleotide"
aacuauaaacuuauaaccutt

SEQ ID NO: 1072 - DNA, 21 bp, Artificial Sequence
  source: /note="Description of Artificial Sequence: Synthetic oligonucleotide"
  source: /note="Description of Combined DNA/RNA Molecule: Synthetic oligonucleotide"
cccagcuguggucucugautt

SEQ ID NO: 1073 - DNA, 21 bp, Artificial Sequence
  source: /note="Description of Artificial Sequence: Synthetic oligonucleotide"
  source: /note="Description of Combined DNA/RNA Molecule: Synthetic oligonucleotide"
ccagcuguggucucugagutt

SEQ ID NO: 1074 - DNA, 21 bp, Artificial Sequence
  source: /note="Description of Artificial Sequence: Synthetic oligonucleotide"
  source: /note="Description of Combined DNA/RNA Molecule: Synthetic oligonucleotide"
cagcuguggucucugagautt

SEQ ID NO: 1075 - DNA, 21 bp, Artificial Sequence
  source: /note="Description of Artificial Sequence: Synthetic oligonucleotide"
  source: /note="Description of Combined DNA/RNA Molecule: Synthetic oligonucleotide"
agcuguggucucugagagutt

SEQ ID NO: 1076 - DNA, 21 bp, Artificial Sequence
  source: /note="Description of Artificial Sequence: Synthetic oligonucleotide"
  source: /note="Description of Combined DNA/RNA Molecule: Synthetic oligonucleotide"
gcuguggucucugagagautt

SEQ ID NO: 1077 - DNA, 21 bp, Artificial Sequence
  source: /note="Description of Artificial Sequence: Synthetic oligonucleotide"
  source: /note="Description of Combined DNA/RNA Molecule: Synthetic oligonucleotide"
cuguggucucugagagacutt

SEQ ID NO: 1078 - DNA, 21 bp, Artificial Sequence
  source: /note="Description of Artificial Sequence: Synthetic oligonucleotide"
  source: /note="Description of Combined DNA/RNA Molecule: Synthetic oligonucleotide"
uguggucucugagagacuutt

SEQ ID NO: 1079 - DNA, 21 bp, Artificial Sequence
  source: /note="Description of Artificial Sequence: Synthetic oligonucleotide"
  source: /note="Description of Combined DNA/RNA Molecule: Synthetic oligonucleotide"
guggucucugagagacugutt

SEQ ID NO: 1080 - DNA, 21 bp, Artificial Sequence
  source: /note="Description of Artificial Sequence: Synthetic oligonucleotide"
  source: /note="Description of Combined DNA/RNA Molecule: Synthetic oligonucleotide"
uggucucugagagacugautt

SEQ ID NO: 1081 - DNA, 21 bp, Artificial Sequence
  source: /note="Description of Artificial Sequence: Synthetic oligonucleotide"
  source: /note="Description of Combined DNA/RNA Molecule: Synthetic oligonucleotide"
ggucucugagagacugaautt

SEQ ID NO: 1082 - DNA, 21 bp, Artificial Sequence
  source: /note="Description of Artificial Sequence: Synthetic oligonucleotide"
  source: /note="Description of Combined DNA/RNA Molecule: Synthetic oligonucleotide"
gucucugagagacugaagutt

SEQ ID NO: 1083 - DNA, 21 bp, Artificial Sequence
  source: /note="Description of Artificial Sequence: Synthetic oligonucleotide"
  source: /note="Description of Combined DNA/RNA Molecule: Synthetic oligonucleotide"
ucucugagagacugaagautt

SEQ ID NO: 1084 - DNA, 21 bp, Artificial Sequence
  source: /note="Description of Artificial Sequence: Synthetic oligonucleotide"
  source: /note="Description of Combined DNA/RNA Molecule: Synthetic oligonucleotide"
cucugagagacugaagauutt

SEQ ID NO: 1085 - DNA, 21 bp, Artificial Sequence
  source: /note="Description of Artificial Sequence: Synthetic oligonucleotide"
  source: /note="Description of Combined DNA/RNA Molecule: Synthetic oligonucleotide"
ucugagagacugaagauuutt

SEQ ID NO: 1086 - DNA, 21 bp, Artificial Sequence
  source: /note="Description of Artificial Sequence: Synthetic oligonucleotide"
  source: /note="Description of Combined DNA/RNA Molecule: Synthetic oligonucleotide"
cugagagacugaagauucutt

SEQ ID NO: 1087 - DNA, 21 bp, Artificial Sequence
  source: /note="Description of Artificial Sequence: Synthetic oligonucleotide"
  source: /note="Description of Combined DNA/RNA Molecule: Synthetic oligonucleotide"
ugagagacugaagauucgutt

SEQ ID NO: 1088 - DNA, 21 bp, Artificial Sequence
  source: /note="Description of Artificial Sequence: Synthetic oligonucleotide"
  source: /note="Description of Combined DNA/RNA Molecule: Synthetic oligonucleotide"
gagagacugaagauucgautt

SEQ ID NO: 1089 - DNA, 21 bp, Artificial Sequence
  source: /note="Description of Artificial Sequence: Synthetic oligonucleotide"
  source: /note="Description of Combined DNA/RNA Molecule: Synthetic oligonucleotide"
agagacugaagauucgagutt

SEQ ID NO: 1090 - DNA, 21 bp, Artificial Sequence
  source: /note="Description of Artificial Sequence: Synthetic oligonucleotide"
  source: /note="Description of Combined DNA/RNA Molecule: Synthetic oligonucleotide"
gagacugaagauucgaggutt

SEQ ID NO: 1091 - DNA, 21 bp, Artificial Sequence
  source: /note="Description of Artificial Sequence: Synthetic oligonucleotide"
  source: /note="Description of Combined DNA/RNA Molecule: Synthetic oligonucleotide"
agacugaagauucgaggcutt

SEQ ID NO: 1092 - DNA, 21 bp, Artificial Sequence
  source: /note="Description of Artificial Sequence: Synthetic oligonucleotide"
  source: /note="Description of Combined DNA/RNA Molecule: Synthetic oligonucleotide"
gacugaagauucgaggcuutt

SEQ ID NO: 1093 - DNA, 21 bp, Artificial Sequence
  source: /note="Description of Artificial Sequence: Synthetic oligonucleotide"
  source: /note="Description of Combined DNA/RNA Molecule: Synthetic oligonucleotide"
acugaagauucgaggcucutt

SEQ ID NO: 1094 - DNA, 21 bp, Artificial Sequence
  source: /note="Description of Artificial Sequence: Synthetic oligonucleotide"
  source: /note="Description of Combined DNA/RNA Molecule: Synthetic oligonucleotide"
cugaagauucgaggcuccutt

SEQ ID NO: 1095 - DNA, 21 bp, Artificial Sequence
  source: /note="Description of Artificial Sequence: Synthetic oligonucleotide"
  source: /note="Description of Combined DNA/RNA Molecule: Synthetic oligonucleotide"
ugaagauucgaggcucccutt

SEQ ID NO: 1096 - DNA, 21 bp, Artificial Sequence
  source: /note="Description of Artificial Sequence: Synthetic oligonucleotide"
  source: /note="Description of Combined DNA/RNA Molecule: Synthetic oligonucleotide"
gaagauucgaggcucccuutt

SEQ ID NO: 1097 - DNA, 21 bp, Artificial Sequence
  source: /note="Description of Artificial Sequence: Synthetic oligonucleotide"
  source: /note="Description of Combined DNA/RNA Molecule: Synthetic oligonucleotide"
aagauucgaggcucccugutt

SEQ ID NO: 1098 - DNA, 21 bp, Artificial Sequence
  source: /note="Description of Artificial Sequence: Synthetic oligonucleotide"
  source: /note="Description of Combined DNA/RNA Molecule: Synthetic oligonucleotide"
agauucgaggcucccuggutt

SEQ ID NO: 1099 - DNA, 21 bp, Artificial Sequence
  source: /note="Description of Artificial Sequence: Synthetic oligonucleotide"
  source: /note="Description of Combined DNA/RNA Molecule: Synthetic oligonucleotide"
gauucgaggcucccuggcutt

SEQ ID NO: 1100 - DNA, 21 bp, Artificial Sequence
  source: /note="Description of Artificial Sequence: Synthetic oligonucleotide"
  source: /note="Description of Combined DNA/RNA Molecule: Synthetic oligonucleotide"
auucgaggcucccuggccutt

SEQ ID NO: 1101 - DNA, 21 bp, Artificial Sequence
  source: /note="Description of Artificial Sequence: Synthetic oligonucleotide"
  source: /note="Description of Combined DNA/RNA Molecule: Synthetic oligonucleotide"
uucgaggcucccuggccautt

SEQ ID NO: 1102 - DNA, 21 bp, Artificial Sequence
  source: /note="Description of Artificial Sequence: Synthetic oligonucleotide"
  source: /note="Description of Combined DNA/RNA Molecule: Synthetic oligonucleotide"
ucgaggcucccuggccagutt

SEQ ID NO: 1103 - DNA, 21 bp, Artificial Sequence
  source: /note="Description of Artificial Sequence: Synthetic oligonucleotide"
  source: /note="Description of Combined DNA/RNA Molecule: Synthetic oligonucleotide"
cuggccagggcagcccuuutt

SEQ ID NO: 1104 - DNA, 21 bp, Artificial Sequence
  source: /note="Description of Artificial Sequence: Synthetic oligonucleotide"
  source: /note="Description of Combined DNA/RNA Molecule: Synthetic oligonucleotide"
uggccagggcagcccuucutt

SEQ ID NO: 1105 - DNA, 21 bp, Artificial Sequence
  source: /note="Description of Artificial Sequence: Synthetic oligonucleotide"
  source: /note="Description of Combined DNA/RNA Molecule: Synthetic oligonucleotide"
ggccagggcagcccuucautt

SEQ ID NO: 1106 - DNA, 21 bp, Artificial Sequence
  source: /note="Description of Artificial Sequence: Synthetic oligonucleotide"
  source: /note="Description of Combined DNA/RNA Molecule: Synthetic oligonucleotide"
gccagggcagcccuucagutt

SEQ ID NO: 1107 - DNA, 21 bp, Artificial Sequence
  source: /note="Description of Artificial Sequence: Synthetic oligonucleotide"
  source: /note="Description of Combined DNA/RNA Molecule: Synthetic oligonucleotide"
ccagggcagcccuucaggutt

SEQ ID NO: 1108 - DNA, 21 bp, Artificial Sequence
  source: /note="Description of Artificial Sequence: Synthetic oligonucleotide"
  source: /note="Description of Combined DNA/RNA Molecule: Synthetic oligonucleotide"
cagggcagcccuucaggautt

SEQ ID NO: 1109 - DNA, 21 bp, Artificial Sequence
  source: /note="Description of Artificial Sequence: Synthetic oligonucleotide"
  source: /note="Description of Combined DNA/RNA Molecule: Synthetic oligonucleotide"
agggcagcccuucaggagutt

SEQ ID NO: 1110 - DNA, 21 bp, Artificial Sequence
  source: /note="Description of Artificial Sequence: Synthetic oligonucleotide"
  source: /note="Description of Combined DNA/RNA Molecule: Synthetic oligonucleotide"
gggcagcccuucaggagcutt

SEQ ID NO: 1111 - DNA, 21 bp, Artificial Sequence
  source: /note="Description of Artificial Sequence: Synthetic oligonucleotide"
  source: /note="Description of Combined DNA/RNA Molecule: Synthetic oligonucleotide"
ggcagcccuucaggagcuutt

SEQ ID NO: 1112 - DNA, 21 bp, Artificial Sequence
  source: /note="Description of Artificial Sequence: Synthetic oligonucleotide"
  source: /note="Description of Combined DNA/RNA Molecule: Synthetic oligonucleotide"
gcagcccuucaggagcucutt

SEQ ID NO: 1113 - DNA, 21 bp, Artificial Sequence
  source: /note="Description of Artificial Sequence: Synthetic oligonucleotide"
  source: /note="Description of Combined DNA/RNA Molecule: Synthetic oligonucleotide"
cagcccuucaggagcuccutt

SEQ ID NO: 1114 - DNA, 21 bp, Artificial Sequence
  source: /note="Description of Artificial Sequence: Synthetic oligonucleotide"
  source: /note="Description of Combined DNA/RNA Molecule: Synthetic oligonucleotide"
agcccuucaggagcuccuutt

SEQ ID NO: 1115 - DNA, 21 bp, Artificial Sequence
  source: /note="Description of Artificial Sequence: Synthetic oligonucleotide"
  source: /note="Description of Combined DNA/RNA Molecule: Synthetic oligonucleotide"
gcccuucaggagcuccuuutt

SEQ ID NO: 1116 - DNA, 21 bp, Artificial Sequence
  source: /note="Description of Artificial Sequence: Synthetic oligonucleotide"
  source: /note="Description of Combined DNA/RNA Molecule: Synthetic oligonucleotide"
cccuucaggagcuccuuautt

SEQ ID NO: 1117 - DNA, 21 bp, Artificial Sequence
  source: /note="Description of Artificial Sequence: Synthetic oligonucleotide"
  source: /note="Description of Combined DNA/RNA Molecule: Synthetic oligonucleotide"
ccuucaggagcuccuuagutt

SEQ ID NO: 1118 - DNA, 21 bp, Artificial Sequence
  source: /note="Description of Artificial Sequence: Synthetic oligonucleotide"
  source: /note="Description of Combined DNA/RNA Molecule: Synthetic oligonucleotide"
cuucaggagcuccuuaguutt

SEQ ID NO: 1119 - DNA, 21 bp, Artificial Sequence
  source: /note="Description of Artificial Sequence: Synthetic oligonucleotide"
  source: /note="Description of Combined DNA/RNA Molecule: Synthetic oligonucleotide"
uucaggagcuccuuaguautt

SEQ ID NO: 1120 - DNA, 21 bp, Artificial Sequence
  source: /note="Description of Artificial Sequence: Synthetic oligonucleotide"
  source: /note="Description of Combined DNA/RNA Molecule: Synthetic oligonucleotide"
ucaggagcuccuuaguaautt

SEQ ID NO: 1121 - DNA, 21 bp, Artificial Sequence
  source: /note="Description of Artificial Sequence: Synthetic oligonucleotide"
  source: /note="Description of Combined DNA/RNA Molecule: Synthetic oligonucleotide"
caggagcuccuuaguaaautt

SEQ ID NO: 1122 - DNA, 21 bp, Artificial Sequence
  source: /note="Description of Artificial Sequence: Synthetic oligonucleotide"
  source: /note="Description of Combined DNA/RNA Molecule: Synthetic oligonucleotide"
aggagcuccuuaguaaagutt

SEQ ID NO: 1123 - DNA, 21 bp, Artificial Sequence
  source: /note="Description of Artificial Sequence: Synthetic oligonucleotide"
  source: /note="Description of Combined DNA/RNA Molecule: Synthetic oligonucleotide"
ggagcuccuuaguaaaggutt

SEQ ID NO: 1124 - DNA, 21 bp, Artificial Sequence
  source: /note="Description of Artificial Sequence: Synthetic oligonucleotide"
  source: /note="Description of Combined DNA/RNA Molecule: Synthetic oligonucleotide"
gagcuccuuaguaaaggautt

SEQ ID NO: 1125 - DNA, 21 bp, Artificial Sequence
  source: /note="Description of Artificial Sequence: Synthetic oligonucleotide"
  source: /note="Description of Combined DNA/RNA Molecule: Synthetic oligonucleotide"
agcuccuuaguaaaggacutt

SEQ ID NO: 1126 - DNA, 21 bp, Artificial Sequence
  source: /note="Description of Artificial Sequence: Synthetic oligonucleotide"
  source: /note="Description of Combined DNA/RNA Molecule: Synthetic oligonucleotide"
gcuccuuaguaaaggacuutt

SEQ ID NO: 1127 - DNA, 21 bp, Artificial Sequence
  source: /note="Description of Artificial Sequence: Synthetic oligonucleotide"
  source: /note="Description of Combined DNA/RNA Molecule: Synthetic oligonucleotide"
cuccuuaguaaaggacuuutt

SEQ ID NO: 1128 - DNA, 21 bp, Artificial Sequence
  source: /note="Description of Artificial Sequence: Synthetic oligonucleotide"
  source: /note="Description of Combined DNA/RNA Molecule: Synthetic oligonucleotide"
uccuuaguaaaggacuuautt

SEQ ID NO: 1129 - DNA, 21 bp, Artificial Sequence
  source: /note="Description of Artificial Sequence: Synthetic oligonucleotide"
  source: /note="Description of Combined DNA/RNA Molecule: Synthetic oligonucleotide"
ccuuaguaaaggacuuauutt

SEQ ID NO: 1130 - DNA, 21 bp, Artificial Sequence
  source: /note="Description of Artificial Sequence: Synthetic oligonucleotide"
  source: /note="Description of Combined DNA/RNA Molecule: Synthetic oligonucleotide"
cuuaguaaaggacuuaucutt

SEQ ID NO: 1131 - DNA, 21 bp, Artificial Sequence
  source: /note="Description of Artificial Sequence: Synthetic oligonucleotide"
  source: /note="Description of Combined DNA/RNA Molecule: Synthetic oligonucleotide"
uuaguaaaggacuuaucautt

SEQ ID NO: 1132 - DNA, 21 bp, Artificial Sequence
  source: /note="Description of Artificial Sequence: Synthetic oligonucleotide"
  source: /note="Description of Combined DNA/RNA Molecule: Synthetic oligonucleotide"
uaguaaaggacuuaucaautt

SEQ ID NO: 1133 - DNA, 21 bp, Artificial Sequence
  source: /note="Description of Artificial Sequence: Synthetic oligonucleotide"
  source: /note="Description of Combined DNA/RNA Molecule: Synthetic oligonucleotide"
aguaaaggacuuaucaaautt

SEQ ID NO: 1134 - DNA, 21 bp, Artificial Sequence
  source: /note="Description of Artificial Sequence: Synthetic oligonucleotide"
  source: /note="Description of Combined DNA/RNA Molecule: Synthetic oligonucleotide"
guaaaggacuuaucaaacutt

SEQ ID NO: 1135 - DNA, 21 bp, Artificial Sequence
  source: /note="Description of Artificial Sequence: Synthetic oligonucleotide"
  source: /note="Description of Combined DNA/RNA Molecule: Synthetic oligonucleotide"
uaaaggacuuaucaaacuutt

SEQ ID NO: 1136 - DNA, 21 bp, Artificial Sequence
  source: /note="Description of Artificial Sequence: Synthetic oligonucleotide"
  source: /note="Description of Combined DNA/RNA Molecule: Synthetic oligonucleotide"
aaaggacuuaucaaacugutt

SEQ ID NO: 1137 - DNA, 21 bp, Artificial Sequence
  source: /note="Description of Artificial Sequence: Synthetic oligonucleotide"
  source: /note="Description of Combined DNA/RNA Molecule: Synthetic oligonucleotide"
aaggacuuaucaaacuggutt

SEQ ID NO: 1138 - DNA, 21 bp, Artificial Sequence
  source: /note="Description of Artificial Sequence: Synthetic oligonucleotide"
  source: /note="Description of Combined DNA/RNA Molecule: Synthetic oligonucleotide"
aggacuuaucaaacugguutt

SEQ ID NO: 1139 - DNA, 21 bp, Artificial Sequence
  source: /note="Description of Artificial Sequence: Synthetic oligonucleotide"
  source: /note="Description of Combined DNA/RNA Molecule: Synthetic oligonucleotide"
ggacuuaucaaacugguuutt

SEQ ID NO: 1140 - DNA, 21 bp, Artificial Sequence
  source: /note="Description of Artificial Sequence: Synthetic oligonucleotide"
  source: /note="Description of Combined DNA/RNA Molecule: Synthetic oligonucleotide"
gacuuaucaaacugguuuutt

SEQ ID NO: 1141 - DNA, 21 bp, Artificial Sequence
  source: /note="Description of Artificial Sequence: Synthetic oligonucleotide"
  source: /note="Description of Combined DNA/RNA Molecule: Synthetic oligonucleotide"
acuuaucaaacugguuucutt

SEQ ID NO: 1142 - DNA, 21 bp, Artificial Sequence
  source: /note="Description of Artificial Sequence: Synthetic oligonucleotide"
  source: /note="Description of Combined DNA/RNA Molecule: Synthetic oligonucleotide"
cuuaucaaacugguuucautt

SEQ ID NO: 1143 - DNA, 21 bp, Artificial Sequence
  source: /note="Description of Artificial Sequence: Synthetic oligonucleotide"
  source: /note="Description of Combined DNA/RNA Molecule: Synthetic oligonucleotide"
uuaucaaacugguuucaautt

SEQ ID NO: 1144 - DNA, 21 bp, Artificial Sequence
  source: /note="Description of Artificial Sequence: Synthetic oligonucleotide"
  source: /note="Description of Combined DNA/RNA Molecule: Synthetic oligonucleotide"
uaucaaacugguuucaaautt

SEQ ID NO: 1145 - DNA, 21 bp, Artificial Sequence
  source: /note="Description of Artificial Sequence: Synthetic oligonucleotide"
  source: /note="Description of Combined DNA/RNA Molecule: Synthetic oligonucleotide"
aucaaacugguuucaaagutt

SEQ ID NO: 1146 - DNA, 21 bp, Artificial Sequence
  source: /note="Description of Artificial Sequence: Synthetic oligonucleotide"
  source: /note="Description of Combined DNA/RNA Molecule: Synthetic oligonucleotide"
ucaaacugguuucaaagcutt

SEQ ID NO: 1147 - DNA, 21 bp, Artificial Sequence
  source: /note="Description of Artificial Sequence: Synthetic oligonucleotide"
  source: /note="Description of Combined DNA/RNA Molecule: Synthetic oligonucleotide"
caaacugguuucaaagcautt

SEQ ID NO: 1148 - DNA, 21 bp, Artificial Sequence
  source: /note="Description of Artificial Sequence: Synthetic oligonucleotide"
  source: /note="Description of Combined DNA/RNA Molecule: Synthetic oligonucleotide"
aaacugguuucaaagcacutt

SEQ ID NO: 1149 - DNA, 21 bp, Artificial Sequence
  source: /note="Description of Artificial Sequence: Synthetic oligonucleotide"
  source: /note="Description of Combined DNA/RNA Molecule: Synthetic oligonucleotide"
aacugguuucaaagcacautt

SEQ ID NO: 1150 - DNA, 21 bp, Artificial Sequence
  source: /note="Description of Artificial Sequence: Synthetic oligonucleotide"
  source: /note="Description of Combined DNA/RNA Molecule: Synthetic oligonucleotide"
acugguuucaaagcacagutt

SEQ ID NO: 1151 - DNA, 21 bp, Artificial Sequence
  source: /note="Description of Artificial Sequence: Synthetic oligonucleotide"
  source: /note="Description of Combined DNA/RNA Molecule: Synthetic oligonucleotide"
cugguuucaaagcacagautt

SEQ ID NO: 1152 - DNA, 21 bp, Artificial Sequence
  source: /note="Description of Artificial Sequence: Synthetic oligonucleotide"
  source: /note="Description of Combined DNA/RNA Molecule: Synthetic oligonucleotide"
ugguuucaaagcacagagutt

SEQ ID NO: 1153 - DNA, 21 bp, Artificial Sequence
  source: /note="Description of Artificial Sequence: Synthetic oligonucleotide"
  source: /note="Description of Combined DNA/RNA Molecule: Synthetic oligonucleotide"
gguuucaaagcacagagcutt

SEQ ID NO: 1154 - DNA, 21 bp, Artificial Sequence
  source: /note="Description of Artificial Sequence: Synthetic oligonucleotide"
  source: /note="Description of Combined DNA/RNA Molecule: Synthetic oligonucleotide"
guuucaaagcacagagcuutt

SEQ ID NO: 1155 - DNA, 21 bp, Artificial Sequence
  source: /note="Description of Artificial Sequence: Synthetic oligonucleotide"
  source: /note="Description of Combined DNA/RNA Molecule: Synthetic oligonucleotide"
uuucaaagcacagagcucutt

SEQ ID NO: 1156 - DNA, 21 bp, Artificial Sequence
  source: /note="Description of Artificial Sequence: Synthetic oligonucleotide"
  source: /note="Description of Combined DNA/RNA Molecule: Synthetic oligonucleotide"
uucaaagcacagagcucautt

SEQ ID NO: 1157 - DNA, 21 bp, Artificial Sequence
  source: /note="Description of Artificial Sequence: Synthetic oligonucleotide"
  source: /note="Description of Combined DNA/RNA Molecule: Synthetic oligonucleotide"
ucaaagcacagagcucaautt

SEQ ID NO: 1158 - DNA, 21 bp, Artificial Sequence
  source: /note="Description of Artificial Sequence: Synthetic oligonucleotide"
  source: /note="Description of Combined DNA/RNA Molecule: Synthetic oligonucleotide"
caaagcacagagcucaagutt

SEQ ID NO: 1159 - DNA, 21 bp, Artificial Sequence
  source: /note="Description of Artificial Sequence: Synthetic oligonucleotide"
  source: /note="Description of Combined DNA/RNA Molecule: Synthetic oligonucleotide"
aaagcacagagcucaaguutt

SEQ ID NO: 1160 - DNA, 21 bp, Artificial Sequence
  source: /note="Description of Artificial Sequence: Synthetic oligonucleotide"
  source: /note="Description of Combined DNA/RNA Molecule: Synthetic oligonucleotide"
aagcacagagcucaaguautt

SEQ ID NO: 1161 - DNA, 21 bp, Artificial Sequence
  source: /note="Description of Artificial Sequence: Synthetic oligonucleotide"
  source: /note="Description of Combined DNA/RNA Molecule: Synthetic oligonucleotide"
agcacagagcucaaguaautt

SEQ ID NO: 1162 - DNA, 21 bp, Artificial Sequence
  source: /note="Description of Artificial Sequence: Synthetic oligonucleotide"
  source: /note="Description of Combined DNA/RNA Molecule: Synthetic oligonucleotide"
gcacagagcucaaguaauutt

SEQ ID NO: 1163 - DNA, 21 bp, Artificial Sequence
  source: /note="Description of Artificial Sequence: Synthetic oligonucleotide"
  source: /note="Description of Combined DNA/RNA Molecule: Synthetic oligonucleotide"
cacagagcucaaguaauuutt

SEQ ID NO: 1164 - DNA, 21 bp, Artificial Sequence
  source: /note="Description of Artificial Sequence: Synthetic oligonucleotide"
  source: /note="Description of Combined DNA/RNA Molecule: Synthetic oligonucleotide"
acagagcucaaguaauuuutt

SEQ ID NO: 1165 - DNA, 21 bp, Artificial Sequence
  source: /note="Description of Artificial Sequence: Synthetic oligonucleotide"
  source: /note="Description of Combined DNA/RNA Molecule: Synthetic oligonucleotide"
cagagcucaaguaauuuautt

SEQ ID NO: 1166 - DNA, 21 bp, Artificial Sequence
  source: /note="Description of Artificial Sequence: Synthetic oligonucleotide"
  source: /note="Description of Combined DNA/RNA Molecule: Synthetic oligonucleotide"
agagcucaaguaauuuacutt

SEQ ID NO: 1167 - DNA, 21 bp, Artificial Sequence
  source: /note="Description of Artificial Sequence: Synthetic oligonucleotide"
  source: /note="Description of Combined DNA/RNA Molecule: Synthetic oligonucleotide"
gagcucaaguaauuuacautt

SEQ ID NO: 1168 - DNA, 21 bp, Artificial Sequence
  source: /note="Description of Artificial Sequence: Synthetic oligonucleotide"
  source: /note="Description of Combined DNA/RNA Molecule: Synthetic oligonucleotide"
agcucaaguaauuuacacutt

SEQ ID NO: 1169 - DNA, 21 bp, Artificial Sequence
  source: /note="Description of Artificial Sequence: Synthetic oligonucleotide"
  source: /note="Description of Combined DNA/RNA Molecule: Synthetic oligonucleotide"
gcucaaguaauuuacaccutt

SEQ ID NO: 1170 - DNA, 21 bp, Artificial Sequence
  source: /note="Description of Artificial Sequence: Synthetic oligonucleotide"
  source: /note="Description of Combined DNA/RNA Molecule: Synthetic oligonucleotide"
cucaaguaauuuacaccautt

SEQ ID NO: 1171 - DNA, 21 bp, Artificial Sequence
  source: /note="Description of Artificial Sequence: Synthetic oligonucleotide"
  source: /note="Description of Combined DNA/RNA Molecule: Synthetic oligonucleotide"
ucaaguaauuuacaccagutt

SEQ ID NO: 1172 - DNA, 21 bp, Artificial Sequence
  source: /note="Description of Artificial Sequence: Synthetic oligonucleotide"
  source: /note="Description of Combined DNA/RNA Molecule: Synthetic oligonucleotide"
caaguaauuuacaccagautt

SEQ ID NO: 1173 - DNA, 21 bp, Artificial Sequence
  source: /note="Description of Artificial Sequence: Synthetic oligonucleotide"
  source: /note="Description of Combined DNA/RNA Molecule: Synthetic oligonucleotide"
aaguaauuuacaccagaautt

SEQ ID NO: 1174 - DNA, 21 bp, Artificial Sequence
  source: /note="Description of Artificial Sequence: Synthetic oligonucleotide"
  source: /note="Description of Combined DNA/RNA Molecule: Synthetic oligonucleotide"
aguaauuuacaccagaaautt

SEQ ID NO: 1175 - DNA, 21 bp, Artificial Sequence
  source: /note="Description of Artificial Sequence: Synthetic oligonucleotide"
  source: /note="Description of Combined DNA/RNA Molecule: Synthetic oligonucleotide"
guaauuuacaccagaaauutt

SEQ ID NO: 1176 - DNA, 21 bp, Artificial Sequence
  source: /note="Description of Artificial Sequence: Synthetic oligonucleotide"
  source: /note="Description of Combined DNA/RNA Molecule: Synthetic oligonucleotide"
uaauuuacaccagaaauautt

SEQ ID NO: 1177 - DNA, 21 bp, Artificial Sequence
  source: /note="Description of Artificial Sequence: Synthetic oligonucleotide"
  source: /note="Description of Combined DNA/RNA Molecule: Synthetic oligonucleotide"
aauuuacaccagaaauacutt

SEQ ID NO: 1178 - DNA, 21 bp, Artificial Sequence
  source: /note="Description of Artificial Sequence: Synthetic oligonucleotide"
  source: /note="Description of Combined DNA/RNA Molecule: Synthetic oligonucleotide"
auuuacaccagaaauaccutt

SEQ ID NO: 1179 - DNA, 21 bp, Artificial Sequence
  source: /note="Description of Artificial Sequence: Synthetic oligonucleotide"
  source: /note="Description of Combined DNA/RNA Molecule: Synthetic oligonucleotide"
uuuacaccagaaauaccautt

SEQ ID NO: 1180 - DNA, 21 bp, Artificial Sequence
  source: /note="Description of Artificial Sequence: Synthetic oligonucleotide"
  source: /note="Description of Combined DNA/RNA Molecule: Synthetic oligonucleotide"
uuacaccagaaauaccaautt

SEQ ID NO: 1181 - DNA, 21 bp, Artificial Sequence
  source: /note="Description of Artificial Sequence: Synthetic oligonucleotide"
  source: /note="Description of Combined DNA/RNA Molecule: Synthetic oligonucleotide"
uacaccagaaauaccaagutt

SEQ ID NO: 1182 - DNA, 21 bp, Artificial Sequence
  source: /note="Description of Artificial Sequence: Synthetic oligonucleotide"
  source: /note="Description of Combined DNA/RNA Molecule: Synthetic oligonucleotide"
acaccagaaauaccaaggutt

SEQ ID NO: 1183 - DNA, 21 bp, Artificial Sequence
  source: /note="Description of Artificial Sequence: Synthetic oligonucleotide"
  source: /note="Description of Combined DNA/RNA Molecule: Synthetic oligonucleotide"
caccagaaauaccaagggutt

SEQ ID NO: 1184 - DNA, 21 bp, Artificial Sequence
  source: /note="Description of Artificial Sequence: Synthetic oligonucleotide"
  source: /note="Description of Combined DNA/RNA Molecule: Synthetic oligonucleotide"
accagaaauaccaaggguutt

SEQ ID NO: 1185 - DNA, 21 bp, Artificial Sequence
  source: /note="Description of Artificial Sequence: Synthetic oligonucleotide"
  source: /note="Description of Combined DNA/RNA Molecule: Synthetic oligonucleotide"
ccagaaauaccaagggugutt

SEQ ID NO: 1186 - DNA, 21 bp, Artificial Sequence
  source: /note="Description of Artificial Sequence: Synthetic oligonucleotide"
  source: /note="Description of Combined DNA/RNA Molecule: Synthetic oligonucleotide"
cagaaauaccaaggguggutt

SEQ ID NO: 1187 - DNA, 21 bp, Artificial Sequence
  source: /note="Description of Artificial Sequence: Synthetic oligonucleotide"
  source: /note="Description of Combined DNA/RNA Molecule: Synthetic oligonucleotide"
agaaauaccaaggguggautt

SEQ ID NO: 1188 - DNA, 21 bp, Artificial Sequence
  source: /note="Description of Artificial Sequence: Synthetic oligonucleotide"
  source: /note="Description of Combined DNA/RNA Molecule: Synthetic oligonucleotide"
gaaauaccaaggguggagutt

SEQ ID NO: 1189 - DNA, 21 bp, Artificial Sequence
  source: /note="Description of Artificial Sequence: Synthetic oligonucleotide"
  source: /note="Description of Combined DNA/RNA Molecule: Synthetic oligonucleotide"
aaauaccaaggguggagautt

SEQ ID NO: 1190 - DNA, 21 bp, Artificial Sequence
  source: /note="Description of Artificial Sequence: Synthetic oligonucleotide"
  source: /note="Description of Combined DNA/RNA Molecule: Synthetic oligonucleotide"
aauaccaaggguggagauutt

SEQ ID NO: 1191 - DNA, 21 bp, Artificial Sequence
  source: /note="Description of Artificial Sequence: Synthetic oligonucleotide"
  source: /note="Description of Combined DNA/RNA Molecule: Synthetic oligonucleotide"
auaccaaggguggagaugutt

SEQ ID NO: 1192 - DNA, 21 bp, Artificial Sequence
  source: /note="Description of Artificial Sequence: Synthetic oligonucleotide"
  source: /note="Description of Combined DNA/RNA Molecule: Synthetic oligonucleotide"
uaccaaggguggagaugcutt

SEQ ID NO: 1193 - DNA, 21 bp, Artificial Sequence
  source: /note="Description of Artificial Sequence: Synthetic oligonucleotide"
  source: /note="Description of Combined DNA/RNA Molecule: Synthetic oligonucleotide"
accaaggguggagaugcuutt

SEQ ID NO: 1194 - DNA, 21 bp, Artificial Sequence
  source: /note="Description of Artificial Sequence: Synthetic oligonucleotide"
  source: /note="Description of Combined DNA/RNA Molecule: Synthetic oligonucleotide"
ccaaggguggagaugcucutt

SEQ ID NO: 1195 - DNA, 21 bp, Artificial Sequence
  source: /note="Description of Artificial Sequence: Synthetic oligonucleotide"
  source: /note="Description of Combined DNA/RNA Molecule: Synthetic oligonucleotide"
caaggguggagaugcuccutt

SEQ ID NO: 1196 - DNA, 21 bp, Artificial Sequence
  source: /note="Description of Artificial Sequence: Synthetic oligonucleotide"
  source: /note="Description of Combined DNA/RNA Molecule: Synthetic oligonucleotide"
aaggguggagaugcuccautt

SEQ ID NO: 1197 - DNA, 21 bp, Artificial Sequence
  source: /note="Description of Artificial Sequence: Synthetic oligonucleotide"
  source: /note="Description of Combined DNA/RNA Molecule: Synthetic oligonucleotide"
aggguggagaugcuccagutt

SEQ ID NO: 1198 - DNA, 21 bp, Artificial Sequence
  source: /note="Description of Artificial Sequence: Synthetic oligonucleotide"
  source: /note="Description of Combined DNA/RNA Molecule: Synthetic oligonucleotide"
ggguggagaugcuccagcutt

SEQ ID NO: 1199 - DNA, 21 bp, Artificial Sequence
  source: /note="Description of Artificial Sequence: Synthetic oligonucleotide"
  source: /note="Description of Combined DNA/RNA Molecule: Synthetic oligonucleotide"
gguggagaugcuccagcuutt

SEQ ID NO: 1200 - DNA, 21 bp, Artificial Sequence
  source: /note="Description of Artificial Sequence: Synthetic oligonucleotide"
  source: /note="Description of Combined DNA/RNA Molecule: Synthetic oligonucleotide"
guggagaugcuccagcugutt

SEQ ID NO: 1201 - DNA, 21 bp, Artificial Sequence
  source: /note="Description of Artificial Sequence: Synthetic oligonucleotide"
  source: /note="Description of Combined DNA/RNA Molecule: Synthetic oligonucleotide"
uggagaugcuccagcugcutt

SEQ ID NO: 1202 - DNA, 21 bp, Artificial Sequence
  source: /note="Description of Artificial Sequence: Synthetic oligonucleotide"
  source: /note="Description of Combined DNA/RNA Molecule: Synthetic oligonucleotide"
ggagaugcuccagcugcuutt

SEQ ID NO: 1203 - DNA, 21 bp, Artificial Sequence
  source: /note="Description of Artificial Sequence: Synthetic oligonucleotide"
  source: /note="Description of Combined DNA/RNA Molecule: Synthetic oligonucleotide"
gagaugcuccagcugcugutt

SEQ ID NO: 1204 - DNA, 21 bp, Artificial Sequence
  source: /note="Description of Artificial Sequence: Synthetic oligonucleotide"
  source: /note="Description of Combined DNA/RNA Molecule: Synthetic oligonucleotide"
agaugcuccagcugcuggutt

SEQ ID NO: 1205 - DNA, 21 bp, Artificial Sequence
  source: /note="Description of Artificial Sequence: Synthetic oligonucleotide"
  source: /note="Description of Combined DNA/RNA Molecule: Synthetic oligonucleotide"
gaugcuccagcugcugguutt

SEQ ID NO: 1206 - DNA, 21 bp, Artificial Sequence
  source: /note="Description of Artificial Sequence: Synthetic oligonucleotide"
  source: /note="Description of Combined DNA/RNA Molecule: Synthetic oligonucleotide"
augcuccagcugcuggugutt

SEQ ID NO: 1207 - DNA, 21 bp, Artificial Sequence
  source: /note="Description of Artificial Sequence: Synthetic oligonucleotide"
  source: /note="Description of Combined DNA/RNA Molecule: Synthetic oligonucleotide"
ugcuccagcugcuggugautt

SEQ ID NO: 1208 - DNA, 21 bp, Artificial Sequence
  source: /note="Description of Artificial Sequence: Synthetic oligonucleotide"
  source: /note="Description of Combined DNA/RNA Molecule: Synthetic oligonucleotide"
gcuccagcugcuggugaautt

SEQ ID NO: 1209 - DNA, 21 bp, Artificial Sequence
  source: /note="Description of Artificial Sequence: Synthetic oligonucleotide"
  source: /note="Description of Combined DNA/RNA Molecule: Synthetic oligonucleotide"
cuccagcugcuggugaagutt

SEQ ID NO: 1210 - DNA, 21 bp, Artificial Sequence
  source: /note="Description of Artificial Sequence: Synthetic oligonucleotide"
  source: /note="Description of Combined DNA/RNA Molecule: Synthetic oligonucleotide"
uccagcugcuggugaagautt

SEQ ID NO: 1211 - DNA, 21 bp, Artificial Sequence
  source: /note="Description of Artificial Sequence: Synthetic oligonucleotide"
  source: /note="Description of Combined DNA/RNA Molecule: Synthetic oligonucleotide"
ccagcugcuggugaagauutt

SEQ ID NO: 1212 - DNA, 21 bp, Artificial Sequence
  source: /note="Description of Artificial Sequence: Synthetic oligonucleotide"
  source: /note="Description of Combined DNA/RNA Molecule: Synthetic oligonucleotide"
cagcugcuggugaagaugutt

SEQ ID NO: 1213 - DNA, 21 bp, Artificial Sequence
  source: /note="Description of Artificial Sequence: Synthetic oligonucleotide"
  source: /note="Description of Combined DNA/RNA Molecule: Synthetic oligonucleotide"
agcugcuggugaagaugcutt

SEQ ID NO: 1214 - DNA, 21 bp, Artificial Sequence
  source: /note="Description of Artificial Sequence: Synthetic oligonucleotide"
  source: /note="Description of Combined DNA/RNA Molecule: Synthetic oligonucleotide"
gcugcuggugaagaugcautt

SEQ ID NO: 1215 - DNA, 21 bp, Artificial Sequence
  source: /note="Description of Artificial Sequence: Synthetic oligonucleotide"
  source: /note="Description of Combined DNA/RNA Molecule: Synthetic oligonucleotide"
cugcuggugaagaugcauutt

SEQ ID NO: 1216 - DNA, 21 bp, Artificial Sequence
  source: /note="Description of Artificial Sequence: Synthetic oligonucleotide"
  source: /note="Description of Combined DNA/RNA Molecule: Synthetic oligonucleotide"
ugcuggugaagaugcaugutt

SEQ ID NO: 1217 - DNA, 21 bp, Artificial Sequence
  source: /note="Description of Artificial Sequence: Synthetic oligonucleotide"
  source: /note="Description of Combined DNA/RNA Molecule: Synthetic oligonucleotide"
gcuggugaagaugcaugautt

SEQ ID NO: 1218 - DNA, 21 bp, Artificial Sequence
  source: /note="Description of Artificial Sequence: Synthetic oligonucleotide"
  source: /note="Description of Combined DNA/RNA Molecule: Synthetic oligonucleotide"
cuggugaagaugcaugaautt

SEQ ID NO: 1219 - DNA, 21 bp, Artificial Sequence
  source: /note="Description of Artificial Sequence: Synthetic oligonucleotide"
  source: /note="Description of Combined DNA/RNA Molecule: Synthetic oligonucleotide"
uggugaagaugcaugaauutt

SEQ ID NO: 1220 - DNA, 21 bp, Artificial Sequence
  source: /note="Description of Artificial Sequence: Synthetic oligonucleotide"
  source: /note="Description of Combined DNA/RNA Molecule: Synthetic oligonucleotide"
ggugaagaugcaugaauautt

SEQ ID NO: 1221 - DNA, 21 bp, Artificial Sequence
  source: /note="Description of Artificial Sequence: Synthetic oligonucleotide"
  source: /note="Description of Combined DNA/RNA Molecule: Synthetic oligonucleotide"
gugaagaugcaugaauagutt

SEQ ID NO: 1222 - DNA, 21 bp, Artificial Sequence
  source: /note="Description of Artificial Sequence: Synthetic oligonucleotide"
  source: /note="Description of Combined DNA/RNA Molecule: Synthetic oligonucleotide"
ugaagaugcaugaauaggutt

SEQ ID NO: 1223 - DNA, 21 bp, Artificial Sequence
  source: /note="Description of Artificial Sequence: Synthetic oligonucleotide"
  source: /note="Description of Combined DNA/RNA Molecule: Synthetic oligonucleotide"
gaagaugcaugaauagguutt

SEQ ID NO: 1224 - DNA, 21 bp, Artificial Sequence
  source: /note="Description of Artificial Sequence: Synthetic oligonucleotide"
  source: /note="Description of Combined DNA/RNA Molecule: Synthetic oligonucleotide"
aagaugcaugaauaggucutt

SEQ ID NO: 1225 - DNA, 21 bp, Artificial Sequence
  source: /note="Description of Artificial Sequence: Synthetic oligonucleotide"
  source: /note="Description of Combined DNA/RNA Molecule: Synthetic oligonucleotide"
agaugcaugaauagguccutt

SEQ ID NO: 1226 - DNA, 21 bp, Artificial Sequence
  source: /note="Description of Artificial Sequence: Synthetic oligonucleotide"
  source: /note="Description of Combined DNA/RNA Molecule: Synthetic oligonucleotide"
gaugcaugaauagguccautt

SEQ ID NO: 1227 - DNA, 21 bp, Artificial Sequence
  source: /note="Description of Artificial Sequence: Synthetic oligonucleotide"
  source: /note="Description of Combined DNA/RNA Molecule: Synthetic oligonucleotide"
augcaugaauagguccaautt

SEQ ID NO: 1228 - DNA, 21 bp, Artificial Sequence
  source: /note="Description of Artificial Sequence: Synthetic oligonucleotide"
  source: /note="Description of Combined DNA/RNA Molecule: Synthetic oligonucleotide"
ugcaugaauagguccaacutt

SEQ ID NO: 1229 - DNA, 21 bp, Artificial Sequence
  source: /note="Description of Artificial Sequence: Synthetic oligonucleotide"
  source: /note="Description of Combined DNA/RNA Molecule: Synthetic oligonucleotide"
gcaugaauagguccaaccutt

SEQ ID NO: 1230 - DNA, 21 bp, Artificial Sequence
  source: /note="Description of Artificial Sequence: Synthetic oligonucleotide"
  source: /note="Description of Combined DNA/RNA Molecule: Synthetic oligonucleotide"
caugaauagguccaaccautt

SEQ ID NO: 1231 - DNA, 21 bp, Artificial Sequence
  source: /note="Description of Artificial Sequence: Synthetic oligonucleotide"
  source: /note="Description of Combined DNA/RNA Molecule: Synthetic oligonucleotide"
augaauagguccaaccagutt

SEQ ID NO: 1232 - DNA, 21 bp, Artificial Sequence
  source: /note="Description of Artificial Sequence: Synthetic oligonucleotide"
  source: /note="Description of Combined DNA/RNA Molecule: Synthetic oligonucleotide"
ugaauagguccaaccagcutt

SEQ ID NO: 1233 - DNA, 21 bp, Artificial Sequence
  source: /note="Description of Artificial Sequence: Synthetic oligonucleotide"
  source: /note="Description of Combined DNA/RNA Molecule: Synthetic oligonucleotide"
gaauagguccaaccagcuutt

SEQ ID NO: 1234 - DNA, 21 bp, Artificial Sequence
  source: /note="Description of Artificial Sequence: Synthetic oligonucleotide"
  source: /note="Description of Combined DNA/RNA Molecule: Synthetic oligonucleotide"
aauagguccaaccagcugutt

SEQ ID NO: 1235 - DNA, 21 bp, Artificial Sequence
  source: /note="Description of Artificial Sequence: Synthetic oligonucleotide"
  source: /note="Description of Combined DNA/RNA Molecule: Synthetic oligonucleotide"
auagguccaaccagcuguutt

SEQ ID NO: 1236 - DNA, 21 bp, Artificial Sequence
  source: /note="Description of Artificial Sequence: Synthetic oligonucleotide"
  source: /note="Description of Combined DNA/RNA Molecule: Synthetic oligonucleotide"
uagguccaaccagcuguautt

SEQ ID NO: 1237 - DNA, 21 bp, Artificial Sequence
  source: /note="Description of Artificial Sequence: Synthetic oligonucleotide"
  source: /note="Description of Combined DNA/RNA Molecule: Synthetic oligonucleotide"
agguccaaccagcuguacutt

SEQ ID NO: 1238 - DNA, 21 bp, Artificial Sequence
  source: /note="Description of Artificial Sequence: Synthetic oligonucleotide"
  source: /note="Description of Combined DNA/RNA Molecule: Synthetic oligonucleotide"
gguccaaccagcuguacautt

SEQ ID NO: 1239 - DNA, 21 bp, Artificial Sequence
  source: /note="Description of Artificial Sequence: Synthetic oligonucleotide"
  source: /note="Description of Combined DNA/RNA Molecule: Synthetic oligonucleotide"
guccaaccagcuguacauutt

SEQ ID NO: 1240 - DNA, 21 bp, Artificial Sequence
  source: /note="Description of Artificial Sequence: Synthetic oligonucleotide"
  source: /note="Description of Combined DNA/RNA Molecule: Synthetic oligonucleotide"
uccaaccagcuguacauuutt

SEQ ID NO: 1241 - DNA, 21 bp, Artificial Sequence
  source: /note="Description of Artificial Sequence: Synthetic oligonucleotide"
  source: /note="Description of Combined DNA/RNA Molecule: Synthetic oligonucleotide"
ccaaccagcuguacauuuutt

SEQ ID NO: 1242 - DNA, 21 bp, Artificial Sequence
  source: /note="Description of Artificial Sequence: Synthetic oligonucleotide"
  source: /note="Description of Combined DNA/RNA Molecule: Synthetic oligonucleotide"
caaccagcuguacauuugutt

SEQ ID NO: 1243 - DNA, 21 bp, Artificial Sequence
  source: /note="Description of Artificial Sequence: Synthetic oligonucleotide"
  source: /note="Description of Combined DNA/RNA Molecule: Synthetic oligonucleotide"
aaccagcuguacauuuggutt

SEQ ID NO: 1244 - DNA, 21 bp, Artificial Sequence
  source: /note="Description of Artificial Sequence: Synthetic oligonucleotide"
  source: /note="Description of Combined DNA/RNA Molecule: Synthetic oligonucleotide"
accagcuguacauuuggautt

SEQ ID NO: 1245 - DNA, 21 bp, Artificial Sequence
  source: /note="Description of Artificial Sequence: Synthetic oligonucleotide"
  source: /note="Description of Combined DNA/RNA Molecule: Synthetic oligonucleotide"
ccagcuguacauuuggaautt

SEQ ID NO: 1246 - DNA, 21 bp, Artificial Sequence
  source: /note="Description of Artificial Sequence: Synthetic oligonucleotide"
  source: /note="Description of Combined DNA/RNA Molecule: Synthetic oligonucleotide"
cagcuguacauuuggaaautt

SEQ ID NO: 1247 - DNA, 21 bp, Artificial Sequence
  source: /note="Description of Artificial Sequence: Synthetic oligonucleotide"
  source: /note="Description of Combined DNA/RNA Molecule: Synthetic oligonucleotide"
agcuguacauuuggaaaautt

SEQ ID NO: 1248 - DNA, 21 bp, Artificial Sequence
  source: /note="Description of Artificial Sequence: Synthetic oligonucleotide"
  source: /note="Description of Combined DNA/RNA Molecule: Synthetic oligonucleotide"
gcuguacauuuggaaaaautt

SEQ ID NO: 1249 - DNA, 21 bp, Artificial Sequence
  source: /note="Description of Artificial Sequence: Synthetic oligonucleotide"
  source: /note="Description of Combined DNA/RNA Molecule: Synthetic oligonucleotide"
cuguacauuuggaaaaauutt

SEQ ID NO: 1250 - DNA, 21 bp, Artificial Sequence
  source: /note="Description of Artificial Sequence: Synthetic oligonucleotide"
  source: /note="Description of Combined DNA/RNA Molecule: Synthetic oligonucleotide"
uguacauuuggaaaaauautt

SEQ ID NO: 1251 - DNA, 21 bp, Artificial Sequence
  source: /note="Description of Artificial Sequence: Synthetic oligonucleotide"
  source: /note="Description of Combined DNA/RNA Molecule: Synthetic oligonucleotide"
guacauuuggaaaaauaautt

SEQ ID NO: 1252 - DNA, 21 bp, Artificial Sequence
  source: /note="Description of Artificial Sequence: Synthetic oligonucleotide"
  source: /note="Description of Combined DNA/RNA Molecule: Synthetic oligonucleotide"
cauuuggaaaaauaaaacutt

SEQ ID NO: 1253 - DNA, 21 bp, Artificial Sequence
  source: /note="Description of Artificial Sequence: Synthetic oligonucleotide"
  source: /note="Description of Combined DNA/RNA Molecule: Synthetic oligonucleotide"
aaagaugucggacaaaaagtt

SEQ ID NO: 1254 - DNA, 21 bp, Artificial Sequence
  source: /note="Description of Artificial Sequence: Synthetic oligonucleotide"
  source: /note="Description of Combined DNA/RNA Molecule: Synthetic oligonucleotide"
acaagaugucggacaaaaatt

SEQ ID NO: 1255 - DNA, 21 bp, Artificial Sequence
  source: /note="Description of Artificial Sequence: Synthetic oligonucleotide"
  source: /note="Description of Combined DNA/RNA Molecule: Synthetic oligonucleotide"
aucaagaugucggacaaaatt

SEQ ID NO: 1256 - DNA, 21 bp, Artificial Sequence
  source: /note="Description of Artificial Sequence: Synthetic oligonucleotide"
  source: /note="Description of Combined DNA/RNA Molecule: Synthetic oligonucleotide"
agucaagaugucggacaaatt

SEQ ID NO: 1257 - DNA, 21 bp, Artificial Sequence
  source: /note="Description of Artificial Sequence: Synthetic oligonucleotide"
  source: /note="Description of Combined DNA/RNA Molecule: Synthetic oligonucleotide"
acgucaagaugucggacaatt

SEQ ID NO: 1258 - DNA, 21 bp, Artificial Sequence
  source: /note="Description of Artificial Sequence: Synthetic oligonucleotide"
  source: /note="Description of Combined DNA/RNA Molecule: Synthetic oligonucleotide"
aucgucaagaugucggacatt

SEQ ID NO: 1259 - DNA, 21 bp, Artificial Sequence
  source: /note="Description of Artificial Sequence: Synthetic oligonucleotide"
  source: /note="Description of Combined DNA/RNA Molecule: Synthetic oligonucleotide"
acucgucaagaugucggactt

SEQ ID NO: 1260 - DNA, 21 bp, Artificial Sequence
  source: /note="Description of Artificial Sequence: Synthetic oligonucleotide"
  source: /note="Description of Combined DNA/RNA Molecule: Synthetic oligonucleotide"
accucgucaagaugucggatt

SEQ ID NO: 1261 - DNA, 21 bp, Artificial Sequence
  source: /note="Description of Artificial Sequence: Synthetic oligonucleotide"
  source: /note="Description of Combined DNA/RNA Molecule: Synthetic oligonucleotide"
agccucgucaagaugucggtt

SEQ ID NO: 1262 - DNA, 21 bp, Artificial Sequence
  source: /note="Description of Artificial Sequence: Synthetic oligonucleotide"
  source: /note="Description of Combined DNA/RNA Molecule: Synthetic oligonucleotide"
aagccucgucaagaugucgtt

SEQ ID NO: 1263 - DNA, 21 bp, Artificial Sequence
  source: /note="Description of Artificial Sequence: Synthetic oligonucleotide"
  source: /note="Description of Combined DNA/RNA Molecule: Synthetic oligonucleotide"
acagccucgucaagauguctt

SEQ ID NO: 1264 - DNA, 21 bp, Artificial Sequence
  source: /note="Description of Artificial Sequence: Synthetic oligonucleotide"
  source: /note="Description of Combined DNA/RNA Molecule: Synthetic oligonucleotide"
agcagccucgucaagaugutt

SEQ ID NO: 1265 - DNA, 21 bp, Artificial Sequence
  source: /note="Description of Artificial Sequence: Synthetic oligonucleotide"
  source: /note="Description of Combined DNA/RNA Molecule: Synthetic oligonucleotide"
acgcagccucgucaagaugtt

SEQ ID NO: 1266 - DNA, 21 bp, Artificial Sequence
  source: /note="Description of Artificial Sequence: Synthetic oligonucleotide"
  source: /note="Description of Combined DNA/RNA Molecule: Synthetic oligonucleotide"
accgcagccucgucaagautt

SEQ ID NO: 1267 - DNA, 21 bp, Artificial Sequence
  source: /note="Description of Artificial Sequence: Synthetic oligonucleotide"
  source: /note="Description of Combined DNA/RNA Molecule: Synthetic oligonucleotide"
aaccgcagccucgucaagatt

SEQ ID NO: 1268 - DNA, 21 bp, Artificial Sequence
  source: /note="Description of Artificial Sequence: Synthetic oligonucleotide"
  source: /note="Description of Combined DNA/RNA Molecule: Synthetic oligonucleotide"
acaccgcagccucgucaagtt

SEQ ID NO: 1269 - DNA, 21 bp, Artificial Sequence
  source: /note="Description of Artificial Sequence: Synthetic oligonucleotide"
  source: /note="Description of Combined DNA/RNA Molecule: Synthetic oligonucleotide"
aacaccgcagccucgucaatt

SEQ ID NO: 1270 - DNA, 21 bp, Artificial Sequence
  source: /note="Description of Artificial Sequence: Synthetic oligonucleotide"
  source: /note="Description of Combined DNA/RNA Molecule: Synthetic oligonucleotide"
agacaccgcagccucgucatt

SEQ ID NO: 1271 - DNA, 21 bp, Artificial Sequence
  source: /note="Description of Artificial Sequence: Synthetic oligonucleotide"
  source: /note="Description of Combined DNA/RNA Molecule: Synthetic oligonucleotide"
aagacaccgcagccucguctt

SEQ ID NO: 1272 - DNA, 21 bp, Artificial Sequence
  source: /note="Description of Artificial Sequence: Synthetic oligonucleotide"
  source: /note="Description of Combined DNA/RNA Molecule: Synthetic oligonucleotide"
acagacaccgcagccucgutt

SEQ ID NO: 1273 - DNA, 21 bp, Artificial Sequence
  source: /note="Description of Artificial Sequence: Synthetic oligonucleotide"
  source: /note="Description of Combined DNA/RNA Molecule: Synthetic oligonucleotide"
agcagacaccgcagccucgtt

SEQ ID NO: 1274 - DNA, 21 bp, Artificial Sequence
  source: /note="Description of Artificial Sequence: Synthetic oligonucleotide"
  source: /note="Description of Combined DNA/RNA Molecule: Synthetic oligonucleotide"
aagcagacaccgcagccuctt

SEQ ID NO: 1275 - DNA, 21 bp, Artificial Sequence
  source: /note="Description of Artificial Sequence: Synthetic oligonucleotide"
  source: /note="Description of Combined DNA/RNA Molecule: Synthetic oligonucleotide"
acagcagacaccgcagccutt

SEQ ID NO: 1276 - DNA, 21 bp, Artificial Sequence
  source: /note="Description of Artificial Sequence: Synthetic oligonucleotide"
agcagcagacaccgcagcctt

SEQ ID NO: 1277 - DNA, 21 bp, Artificial Sequence
  source: /note="Description of Artificial Sequence: Synthetic oligonucleotide"
aagcagcagacaccgcagctt

SEQ ID NO: 1278 - DNA, 21 bp, Artificial Sequence
  source: /note="Description of Artificial Sequence: Synthetic oligonucleotide"
  source: /note="Description of Combined DNA/RNA Molecule: Synthetic oligonucleotide"
auagcagcagacaccgcagtt

SEQ ID NO: 1279 - DNA, 21 bp, Artificial Sequence
  source: /note="Description of Artificial Sequence: Synthetic oligonucleotide"
  source: /note="Description of Combined DNA/RNA Molecule: Synthetic oligonucleotide"
aauagcagcagacaccgcatt

SEQ ID NO: 1280 - DNA, 21 bp, Artificial Sequence
  source: /note="Description of Artificial Sequence: Synthetic oligonucleotide"
  source: /note="Description of Combined DNA/RNA Molecule: Synthetic oligonucleotide"
aaauagcagcagacaccgctt

SEQ ID NO: 1281 - DNA, 21 bp, Artificial Sequence
  source: /note="Description of Artificial Sequence: Synthetic oligonucleotide"
  source: /note="Description of Combined DNA/RNA Molecule: Synthetic oligonucleotide"
agaauagcagcagacaccgtt

SEQ ID NO: 1282 - DNA, 21 bp, Artificial Sequence
  source: /note="Description of Artificial Sequence: Synthetic oligonucleotide"
  source: /note="Description of Combined DNA/RNA Molecule: Synthetic oligonucleotide"
aagaauagcagcagacacctt

SEQ ID NO: 1283 - DNA, 21 bp, Artificial Sequence
  source: /note="Description of Artificial Sequence: Synthetic oligonucleotide"
  source: /note="Description of Combined DNA/RNA Molecule: Synthetic oligonucleotide"
agagaauagcagcagacactt

SEQ ID NO: 1284 - DNA, 21 bp, Artificial Sequence
  source: /note="Description of Artificial Sequence: Synthetic oligonucleotide"
  source: /note="Description of Combined DNA/RNA Molecule: Synthetic oligonucleotide"
aggagaauagcagcagacatt

SEQ ID NO: 1285 - DNA, 21 bp, Artificial Sequence
  source: /note="Description of Artificial Sequence: Synthetic oligonucleotide"
  source: /note="Description of Combined DNA/RNA Molecule: Synthetic oligonucleotide"
acggagaauagcagcagactt

SEQ ID NO: 1286 - DNA, 21 bp, Artificial Sequence
  source: /note="Description of Artificial Sequence: Synthetic oligonucleotide"
  source: /note="Description of Combined DNA/RNA Molecule: Synthetic oligonucleotide"
aucggagaauagcagcagatt

SEQ ID NO: 1287 - DNA, 21 bp, Artificial Sequence
  source: /note="Description of Artificial Sequence: Synthetic oligonucleotide"
  source: /note="Description of Combined DNA/RNA Molecule: Synthetic oligonucleotide"
acucggagaauagcagcagtt

SEQ ID NO: 1288 - DNA, 21 bp, Artificial Sequence
  source: /note="Description of Artificial Sequence: Synthetic oligonucleotide"
  source: /note="Description of Combined DNA/RNA Molecule: Synthetic oligonucleotide"
agcucggagaauagcagcatt

SEQ ID NO: 1289 - DNA, 21 bp, Artificial Sequence
  source: /note="Description of Artificial Sequence: Synthetic oligonucleotide"
  source: /note="Description of Combined DNA/RNA Molecule: Synthetic oligonucleotide"
aagcucggagaauagcagctt

SEQ ID NO: 1290 - DNA, 21 bp, Artificial Sequence
  source: /note="Description of Artificial Sequence: Synthetic oligonucleotide"
  source: /note="Description of Combined DNA/RNA Molecule: Synthetic oligonucleotide"
aaagcucggagaauagcagtt

SEQ ID NO: 1291 - DNA, 21 bp, Artificial Sequence
  source: /note="Description of Artificial Sequence: Synthetic oligonucleotide"
  source: /note="Description of Combined DNA/RNA Molecule: Synthetic oligonucleotide"
agaagcucggagaauagcatt

SEQ ID NO: 1292 - DNA, 21 bp, Artificial Sequence
  source: /note="Description of Artificial Sequence: Synthetic oligonucleotide"
  source: /note="Description of Combined DNA/RNA Molecule: Synthetic oligonucleotide"
acgaagcucggagaauagctt

SEQ ID NO: 1293 - DNA, 21 bp, Artificial Sequence
  source: /note="Description of Artificial Sequence: Synthetic oligonucleotide"
  source: /note="Description of Combined DNA/RNA Molecule: Synthetic oligonucleotide"
agcgaagcucggagaauagtt

SEQ ID NO: 1294 - DNA, 21 bp, Artificial Sequence
  source: /note="Description of Artificial Sequence: Synthetic oligonucleotide"
  source: /note="Description of Combined DNA/RNA Molecule: Synthetic oligonucleotide"
augcgaagcucggagaauatt

SEQ ID NO: 1295 - DNA, 21 bp, Artificial Sequence
  source: /note="Description of Artificial Sequence: Synthetic oligonucleotide"
  source: /note="Description of Combined DNA/RNA Molecule: Synthetic oligonucleotide"
auugcgaagcucggagaautt

SEQ ID NO: 1296 - DNA, 21 bp, Artificial Sequence
  source: /note="Description of Artificial Sequence: Synthetic oligonucleotide"
  source: /note="Description of Combined DNA/RNA Molecule: Synthetic oligonucleotide"
aauugcgaagcucggagaatt

SEQ ID NO: 1297 - DNA, 21 bp, Artificial Sequence
  source: /note="Description of Artificial Sequence: Synthetic oligonucleotide"
  source: /note="Description of Combined DNA/RNA Molecule: Synthetic oligonucleotide"
acauugcgaagcucggagatt

SEQ ID NO: 1298 - DNA, 21 bp, Artificial Sequence
  source: /note="Description of Artificial Sequence: Synthetic oligonucleotide"
  source: /note="Description of Combined DNA/RNA Molecule: Synthetic oligonucleotide"
agcauugcgaagcucggagtt

SEQ ID NO: 1299 - DNA, 21 bp, Artificial Sequence
  source: /note="Description of Artificial Sequence: Synthetic oligonucleotide"
  source: /note="Description of Combined DNA/RNA Molecule: Synthetic oligonucleotide"
aggcauugcgaagcucggatt

SEQ ID NO: 1300 - DNA, 21 bp, Artificial Sequence
  source: /note="Description of Artificial Sequence: Synthetic oligonucleotide"
  source: /note="Description of Combined DNA/RNA Molecule: Synthetic oligonucleotide"
acggcauugcgaagcucggtt

SEQ ID NO: 1301 - DNA, 21 bp, Artificial Sequence
  source: /note="Description of Artificial Sequence: Synthetic oligonucleotide"
  source: /note="Description of Combined DNA/RNA Molecule: Synthetic oligonucleotide"
agcggcauugcgaagcucgtt

SEQ ID NO: 1302 - DNA, 21 bp, Artificial Sequence
  source: /note="Description of Artificial Sequence: Synthetic oligonucleotide"
  source: /note="Description of Combined DNA/RNA Molecule: Synthetic oligonucleotide"
aggcggcauugcgaagcuctt

SEQ ID NO: 1303 - DNA, 21 bp, Artificial Sequence
  source: /note="Description of Artificial Sequence: Synthetic oligonucleotide"
  source: /note="Description of Combined DNA/RNA Molecule: Synthetic oligonucleotide"
aaggcggcauugcgaagcutt

SEQ ID NO: 1304 - DNA, 21 bp, Artificial Sequence
  source: /note="Description of Artificial Sequence: Synthetic oligonucleotide"
  source: /note="Description of Combined DNA/RNA Molecule: Synthetic oligonucleotide"
auaggcggcauugcgaagctt

SEQ ID NO: 1305 - DNA, 21 bp, Artificial Sequence
  source: /note="Description of Artificial Sequence: Synthetic oligonucleotide"
  source: /note="Description of Combined DNA/RNA Molecule: Synthetic oligonucleotide"
auuaggcggcauugcgaagtt

SEQ ID NO: 1306 - DNA, 21 bp, Artificial Sequence
  source: /note="Description of Artificial Sequence: Synthetic oligonucleotide"
  source: /note="Description of Combined DNA/RNA Molecule: Synthetic oligonucleotide"
acuuaggcggcauugcgaatt

SEQ ID NO: 1307 - DNA, 21 bp, Artificial Sequence
  source: /note="Description of Artificial Sequence: Synthetic oligonucleotide"
  source: /note="Description of Combined DNA/RNA Molecule: Synthetic oligonucleotide"
accuuaggcggcauugcgatt

SEQ ID NO: 1308 - DNA, 21 bp, Artificial Sequence
  source: /note="Description of Artificial Sequence: Synthetic oligonucleotide"
  source: /note="Description of Combined DNA/RNA Molecule: Synthetic oligonucleotide"
auccuuaggcggcauugcgtt

SEQ ID NO: 1309 - DNA, 21 bp, Artificial Sequence
  source: /note="Description of Artificial Sequence: Synthetic oligonucleotide"
  source: /note="Description of Combined DNA/RNA Molecule: Synthetic oligonucleotide"
aguccuuaggcggcauugctt

SEQ ID NO: 1310 - DNA, 21 bp, Artificial Sequence
  source: /note="Description of Artificial Sequence: Synthetic oligonucleotide"
  source: /note="Description of Combined DNA/RNA Molecule: Synthetic oligonucleotide"
acguccuuaggcggcauugtt

SEQ ID NO: 1311 - DNA, 21 bp, Artificial Sequence
  source: /note="Description of Artificial Sequence: Synthetic oligonucleotide"
  source: /note="Description of Combined DNA/RNA Molecule: Synthetic oligonucleotide"
aucguccuuaggcggcauutt

SEQ ID NO: 1312 - DNA, 21 bp, Artificial Sequence
  source: /note="Description of Artificial Sequence: Synthetic oligonucleotide"
  source: /note="Description of Combined DNA/RNA Molecule: Synthetic oligonucleotide"
agucguccuuaggcggcautt

SEQ ID NO: 1313 - DNA, 21 bp, Artificial Sequence
  source: /note="Description of Artificial Sequence: Synthetic oligonucleotide"
  source: /note="Description of Combined DNA/RNA Molecule: Synthetic oligonucleotide"
augucguccuuaggcggcatt

SEQ ID NO: 1314 - DNA, 21 bp, Artificial Sequence
  source: /note="Description of Artificial Sequence: Synthetic oligonucleotide"
  source: /note="Description of Combined DNA/RNA Molecule: Synthetic oligonucleotide"
auugucguccuuaggcggctt

SEQ ID NO: 1315 - DNA, 21 bp, Artificial Sequence
  source: /note="Description of Artificial Sequence: Synthetic oligonucleotide"
  source: /note="Description of Combined DNA/RNA Molecule: Synthetic oligonucleotide"
acuugucguccuuaggcggtt

SEQ ID NO: 1316 - DNA, 21 bp, Artificial Sequence
  source: /note="Description of Artificial Sequence: Synthetic oligonucleotide"
  source: /note="Description of Combined DNA/RNA Molecule: Synthetic oligonucleotide"
aucuugucguccuuaggcgtt

SEQ ID NO: 1317 - DNA, 21 bp, Artificial Sequence
  source: /note="Description of Artificial Sequence: Synthetic oligonucleotide"
  source: /note="Description of Combined DNA/RNA Molecule: Synthetic oligonucleotide"
auucuugucguccuuaggctt

SEQ ID NO: 1318 - DNA, 21 bp, Artificial Sequence
  source: /note="Description of Artificial Sequence: Synthetic oligonucleotide"
  source: /note="Description of Combined DNA/RNA Molecule: Synthetic oligonucleotide"
acuucuugucguccuuaggtt

SEQ ID NO: 1319 - DNA, 21 bp, Artificial Sequence
  source: /note="Description of Artificial Sequence: Synthetic oligonucleotide"
  source: /note="Description of Combined DNA/RNA Molecule: Synthetic oligonucleotide"
aucuucuugucguccuuagtt

SEQ ID NO: 1320 - DNA, 21 bp, Artificial Sequence
  source: /note="Description of Artificial Sequence: Synthetic oligonucleotide"
  source: /note="Description of Combined DNA/RNA Molecule: Synthetic oligonucleotide"
auucuucuugucguccuuatt

SEQ ID NO: 1321 - DNA, 21 bp, Artificial Sequence
  source: /note="Description of Artificial Sequence: Synthetic oligonucleotide"
  source: /note="Description of Combined DNA/RNA Molecule: Synthetic oligonucleotide"
acuucuucuugucguccuutt

SEQ ID NO: 1322 - DNA, 21 bp, Artificial Sequence
  source: /note="Description of Artificial Sequence: Synthetic oligonucleotide"
  source: /note="Description of Combined DNA/RNA Molecule: Synthetic oligonucleotide"
aucuucuucuugucguccutt

SEQ ID NO: 1323 - DNA, 21 bp, Artificial Sequence
  source: /note="Description of Artificial Sequence: Synthetic oligonucleotide"
  source: /note="Description of Combined DNA/RNA Molecule: Synthetic oligonucleotide"
auucuucuucuugucgucctt

SEQ ID NO: 1324 - DNA, 21 bp, Artificial Sequence
  source: /note="Description of Artificial Sequence: Synthetic oligonucleotide"
  source: /note="Description of Combined DNA/RNA Molecule: Synthetic oligonucleotide"
acuucuucuucuugucguctt

SEQ ID NO: 1325 - DNA, 21 bp, Artificial Sequence
  source: /note="Description of Artificial Sequence: Synthetic oligonucleotide"
  source: /note="Description of Combined DNA/RNA Molecule: Synthetic oligonucleotide"
accuucuucuucuugucgutt

SEQ ID NO: 1326 - DNA, 21 bp, Artificial Sequence
  source: /note="Description of Artificial Sequence: Synthetic oligonucleotide"
  source: /note="Description of Combined DNA/RNA Molecule: Synthetic oligonucleotide"
auccuucuucuucuugucgtt

SEQ ID NO: 1327 - DNA, 21 bp, Artificial Sequence
  source: /note="Description of Artificial Sequence: Synthetic oligonucleotide"
  source: /note="Description of Combined DNA/RNA Molecule: Synthetic oligonucleotide"
aguccuucuucuucuuguctt

SEQ ID NO: 1328 - DNA, 21 bp, Artificial Sequence
  source: /note="Description of Artificial Sequence: Synthetic oligonucleotide"
  source: /note="Description of Combined DNA/RNA Molecule: Synthetic oligonucleotide"
acguccuucuucuucuugutt

SEQ ID NO: 1329 - DNA, 21 bp, Artificial Sequence
  source: /note="Description of Artificial Sequence: Synthetic oligonucleotide"
  source: /note="Description of Combined DNA/RNA Molecule: Synthetic oligonucleotide"
agcguccuucuucuucuugtt

SEQ ID NO: 1330 - DNA, 21 bp, Artificial Sequence
  source: /note="Description of Artificial Sequence: Synthetic oligonucleotide"
  source: /note="Description of Combined DNA/RNA Molecule: Synthetic oligonucleotide"
aagcguccuucuucuucuutt

SEQ ID NO: 1331 - DNA, 21 bp, Artificial Sequence
  source: /note="Description of Artificial Sequence: Synthetic oligonucleotide"
  source: /note="Description of Combined DNA/RNA Molecule: Synthetic oligonucleotide"
acagcguccuucuucuucutt

SEQ ID NO: 1332 - DNA, 21 bp, Artificial Sequence
  source: /note="Description of Artificial Sequence: Synthetic oligonucleotide"
  source: /note="Description of Combined DNA/RNA Molecule: Synthetic oligonucleotide"
accagcguccuucuucuuctt

SEQ ID NO: 1333 - DNA, 21 bp, Artificial Sequence
  source: /note="Description of Artificial Sequence: Synthetic oligonucleotide"
  source: /note="Description of Combined DNA/RNA Molecule: Synthetic oligonucleotide"
auccagcguccuucuucuutt

SEQ ID NO: 1334 - DNA, 21 bp, Artificial Sequence
  source: /note="Description of Artificial Sequence: Synthetic oligonucleotide"
  source: /note="Description of Combined DNA/RNA Molecule: Synthetic oligonucleotide"
auuccagcguccuucuucutt

SEQ ID NO: 1335 - DNA, 21 bp, Artificial Sequence
  source: /note="Description of Artificial Sequence: Synthetic oligonucleotide"
  source: /note="Description of Combined DNA/RNA Molecule: Synthetic oligonucleotide"
auuuccagcguccuucuuctt

SEQ ID NO: 1336 - DNA, 21 bp, Artificial Sequence
  source: /note="Description of Artificial Sequence: Synthetic oligonucleotide"
  source: /note="Description of Combined DNA/RNA Molecule: Synthetic oligonucleotide"
acuuuccagcguccuucuutt

SEQ ID NO: 1337 - DNA, 21 bp, Artificial Sequence
  source: /note="Description of Artificial Sequence: Synthetic oligonucleotide"
  source: /note="Description of Combined DNA/RNA Molecule: Synthetic oligonucleotide"
aacuuuccagcguccuucutt

SEQ ID NO: 1338 - DNA, 21 bp, Artificial Sequence
  source: /note="Description of Artificial Sequence: Synthetic oligonucleotide"
  source: /note="Description of Combined DNA/RNA Molecule: Synthetic oligonucleotide"
agacuuuccagcguccuuctt

SEQ ID NO: 1339 - DNA, 21 bp, Artificial Sequence
  source: /note="Description of Artificial Sequence: Synthetic oligonucleotide"
  source: /note="Description of Combined DNA/RNA Molecule: Synthetic oligonucleotide"
acgacuuuccagcguccuutt

SEQ ID NO: 1340 - DNA, 21 bp, Artificial Sequence
  source: /note="Description of Artificial Sequence: Synthetic oligonucleotide"
  source: /note="Description of Combined DNA/RNA Molecule: Synthetic oligonucleotide"
accgacuuuccagcguccutt

SEQ ID NO: 1341 - DNA, 21 bp, Artificial Sequence
  source: /note="Description of Artificial Sequence: Synthetic oligonucleotide"
  source: /note="Description of Combined DNA/RNA Molecule: Synthetic oligonucleotide"
agccgacuuuccagcgucctt

SEQ ID NO: 1342 - DNA, 21 bp, Artificial Sequence
  source: /note="Description of Artificial Sequence: Synthetic oligonucleotide"
  source: /note="Description of Combined DNA/RNA Molecule: Synthetic oligonucleotide"
aggccgacuuuccagcguctt

SEQ ID NO: 1343 - DNA, 21 bp, Artificial Sequence
  source: /note="Description of Artificial Sequence: Synthetic oligonucleotide"
  source: /note="Description of Combined DNA/RNA Molecule: Synthetic oligonucleotide"
auggccgacuuuccagcgutt

SEQ ID NO: 1344 - DNA, 21 bp, Artificial Sequence
  source: /note="Description of Artificial Sequence: Synthetic oligonucleotide"
  source: /note="Description of Combined DNA/RNA Molecule: Synthetic oligonucleotide"
auuggccgacuuuccagcgtt

SEQ ID NO: 1345 - DNA, 21 bp, Artificial Sequence
  source: /note="Description of Artificial Sequence: Synthetic oligonucleotide"
  source: /note="Description of Combined DNA/RNA Molecule: Synthetic oligonucleotide"
acuuggccgacuuuccagctt

SEQ ID NO: 1346 - DNA, 21 bp, Artificial Sequence
  source: /note="Description of Artificial Sequence: Synthetic oligonucleotide"
  source: /note="Description of Combined DNA/RNA Molecule: Synthetic oligonucleotide"
aucuuggccgacuuuccagtt

SEQ ID NO: 1347 - DNA, 21 bp, Artificial Sequence
  source: /note="Description of Artificial Sequence: Synthetic oligonucleotide"
  source: /note="Description of Combined DNA/RNA Molecule: Synthetic oligonucleotide"
auucuuggccgacuuuccatt

SEQ ID NO: 1348 - DNA, 21 bp, Artificial Sequence
  source: /note="Description of Artificial Sequence: Synthetic oligonucleotide"
  source: /note="Description of Combined DNA/RNA Molecule: Synthetic oligonucleotide"
auuucuuggccgacuuucctt

SEQ ID NO: 1349 - DNA, 21 bp, Artificial Sequence
  source: /note="Description of Artificial Sequence: Synthetic oligonucleotide"
  source: /note="Description of Combined DNA/RNA Molecule: Synthetic oligonucleotide"
acuuucuuggccgacuuuctt

SEQ ID NO: 1350 - DNA, 21 bp, Artificial Sequence
  source: /note="Description of Artificial Sequence: Synthetic oligonucleotide"
  source: /note="Description of Combined DNA/RNA Molecule: Synthetic oligonucleotide"
aucuuucuuggccgacuuutt

SEQ ID NO: 1351 - DNA, 21 bp, Artificial Sequence
  source: /note="Description of Artificial Sequence: Synthetic oligonucleotide"
  source: /note="Description of Combined DNA/RNA Molecule: Synthetic oligonucleotide"
agucuuucuuggccgacuutt

SEQ ID NO: 1352 - DNA, 21 bp, Artificial Sequence
  source: /note="Description of Artificial Sequence: Synthetic oligonucleotide"
  source: /note="Description of Combined DNA/RNA Molecule: Synthetic oligonucleotide"
augucuuucuuggccgacutt

SEQ ID NO: 1353 - DNA, 21 bp, Artificial Sequence
  source: /note="Description of Artificial Sequence: Synthetic oligonucleotide"
  source: /note="Description of Combined DNA/RNA Molecule: Synthetic oligonucleotide"
auugucuuucuuggccgactt

SEQ ID NO: 1354 - DNA, 21 bp, Artificial Sequence
  source: /note="Description of Artificial Sequence: Synthetic oligonucleotide"
  source: /note="Description of Combined DNA/RNA Molecule: Synthetic oligonucleotide"
auuugucuuucuuggccgatt

SEQ ID NO: 1355 - DNA, 21 bp, Artificial Sequence
  source: /note="Description of Artificial Sequence: Synthetic oligonucleotide"
  source: /note="Description of Combined DNA/RNA Molecule: Synthetic oligonucleotide"
acuuugucuuucuuggccgtt

SEQ ID NO: 1356 - DNA, 21 bp, Artificial Sequence
  source: /note="Description of Artificial Sequence: Synthetic oligonucleotide"
  source: /note="Description of Combined DNA/RNA Molecule: Synthetic oligonucleotide"
aucuuugucuuucuuggcctt

SEQ ID NO: 1357 - DNA, 21 bp, Artificial Sequence
  source: /note="Description of Artificial Sequence: Synthetic oligonucleotide"
  source: /note="Description of Combined DNA/RNA Molecule: Synthetic oligonucleotide"
agucuuugucuuucuuggctt

SEQ ID NO: 1358 - DNA, 21 bp, Artificial Sequence
  source: /note="Description of Artificial Sequence: Synthetic oligonucleotide"
  source: /note="Description of Combined DNA/RNA Molecule: Synthetic oligonucleotide"
aggucuuugucuuucuuggtt

SEQ ID NO: 1359 - DNA, 21 bp, Artificial Sequence
  source: /note="Description of Artificial Sequence: Synthetic oligonucleotide"
  source: /note="Description of Combined DNA/RNA Molecule: Synthetic oligonucleotide"
agggucuuugucuuucuugtt

SEQ ID NO: 1360 - DNA, 21 bp, Artificial Sequence
  source: /note="Description of Artificial Sequence: Synthetic oligonucleotide"
  source: /note="Description of Combined DNA/RNA Molecule: Synthetic oligonucleotide"
acugggucuuugucuuucutt

SEQ ID NO: 1361 - DNA, 21 bp, Artificial Sequence
  source: /note="Description of Artificial Sequence: Synthetic oligonucleotide"
  source: /note="Description of Combined DNA/RNA Molecule: Synthetic oligonucleotide"
aacugggucuuugucuuuctt

SEQ ID NO: 1362 - DNA, 21 bp, Artificial Sequence
  source: /note="Description of Artificial Sequence: Synthetic oligonucleotide"
  source: /note="Description of Combined DNA/RNA Molecule: Synthetic oligonucleotide"
acacugggucuuugucuuutt

SEQ ID NO: 1363 - DNA, 21 bp, Artificial Sequence
  source: /note="Description of Artificial Sequence: Synthetic oligonucleotide"
  source: /note="Description of Combined DNA/RNA Molecule: Synthetic oligonucleotide"
aucacugggucuuugucuutt

SEQ ID NO: 1364 - DNA, 21 bp, Artificial Sequence
  source: /note="Description of Artificial Sequence: Synthetic oligonucleotide"
  source: /note="Description of Combined DNA/RNA Molecule: Synthetic oligonucleotide"
auucacugggucuuugucutt

SEQ ID NO: 1365 - DNA, 21 bp, Artificial Sequence
  source: /note="Description of Artificial Sequence: Synthetic oligonucleotide"
  source: /note="Description of Combined DNA/RNA Molecule: Synthetic oligonucleotide"
aguucacugggucuuuguctt

SEQ ID NO: 1366 - DNA, 21 bp, Artificial Sequence
  source: /note="Description of Artificial Sequence: Synthetic oligonucleotide"
  source: /note="Description of Combined DNA/RNA Molecule: Synthetic oligonucleotide"
auguucacugggucuuugutt

SEQ ID NO: 1367 - DNA, 21 bp, Artificial Sequence
  source: /note="Description of Artificial Sequence: Synthetic oligonucleotide"
  source: /note="Description of Combined DNA/RNA Molecule: Synthetic oligonucleotide"
auuguucacugggucuuugtt

SEQ ID NO: 1368 - DNA, 21 bp, Artificial Sequence
  source: /note="Description of Artificial Sequence: Synthetic oligonucleotide"
  source: /note="Description of Combined DNA/RNA Molecule: Synthetic oligonucleotide"
auuuguucacugggucuuutt

SEQ ID NO: 1369 - DNA, 21 bp, Artificial Sequence
  source: /note="Description of Artificial Sequence: Synthetic oligonucleotide"
  source: /note="Description of Combined DNA/RNA Molecule: Synthetic oligonucleotide"
aauuuguucacugggucuutt

SEQ ID NO: 1370 - DNA, 21 bp, Artificial Sequence
  source: /note="Description of Artificial Sequence: Synthetic oligonucleotide"
  source: /note="Description of Combined DNA/RNA Molecule: Synthetic oligonucleotide"
agauuuguucacugggucutt

SEQ ID NO: 1371 - DNA, 21 bp, Artificial Sequence
  source: /note="Description of Artificial Sequence: Synthetic oligonucleotide"
  source: /note="Description of Combined DNA/RNA Molecule: Synthetic oligonucleotide"
aggauuuguucacuggguctt

SEQ ID NO: 1372 - DNA, 21 bp, Artificial Sequence
  source: /note="Description of Artificial Sequence: Synthetic oligonucleotide"
  source: /note="Description of Combined DNA/RNA Molecule: Synthetic oligonucleotide"
acggauuuguucacugggutt

SEQ ID NO: 1373 - DNA, 21 bp, Artificial Sequence
  source: /note="Description of Artificial Sequence: Synthetic oligonucleotide"
  source: /note="Description of Combined DNA/RNA Molecule: Synthetic oligonucleotide"
accggauuuguucacugggtt

SEQ ID NO: 1374 - DNA, 21 bp, Artificial Sequence
  source: /note="Description of Artificial Sequence: Synthetic oligonucleotide"
  source: /note="Description of Combined DNA/RNA Molecule: Synthetic oligonucleotide"
auucuuuuuggccuugccctt

SEQ ID NO: 1375 - DNA, 21 bp, Artificial Sequence
  source: /note="Description of Artificial Sequence: Synthetic oligonucleotide"
  source: /note="Description of Combined DNA/RNA Molecule: Synthetic oligonucleotide"
acuucuuuuuggccuugcctt

SEQ ID NO: 1376 - DNA, 21 bp, Artificial Sequence
  source: /note="Description of Artificial Sequence: Synthetic oligonucleotide"
  source: /note="Description of Combined DNA/RNA Molecule: Synthetic oligonucleotide"
aucuucuuuuuggccuugctt

SEQ ID NO: 1377 - DNA, 21 bp, Artificial Sequence
  source: /note="Description of Artificial Sequence: Synthetic oligonucleotide"
  source: /note="Description of Combined DNA/RNA Molecule: Synthetic oligonucleotide"
aacuucuucuuuuuggccutt

SEQ ID NO: 1378 - DNA, 21 bp, Artificial Sequence
  source: /note="Description of Artificial Sequence: Synthetic oligonucleotide"
  source: /note="Description of Combined DNA/RNA Molecule: Synthetic oligonucleotide"
acacuucuucuuuuuggcctt

SEQ ID NO: 1379 - DNA, 21 bp, Artificial Sequence
  source: /note="Description of Artificial Sequence: Synthetic oligonucleotide"
  source: /note="Description of Combined DNA/RNA Molecule: Synthetic oligonucleotide"
accacuucuucuuuuuggctt

SEQ ID NO: 1380 - DNA, 21 bp, Artificial Sequence
  source: /note="Description of Artificial Sequence: Synthetic oligonucleotide"
  source: /note="Description of Combined DNA/RNA Molecule: Synthetic oligonucleotide"
aaccacuucuucuuuuuggtt

SEQ ID NO: 1381 - DNA, 21 bp, Artificial Sequence
  source: /note="Description of Artificial Sequence: Synthetic oligonucleotide"
  source: /note="Description of Combined DNA/RNA Molecule: Synthetic oligonucleotide"
agaccacuucuucuuuuugtt

SEQ ID NO: 1382 - DNA, 21 bp, Artificial Sequence
  source: /note="Description of Artificial Sequence: Synthetic oligonucleotide"
  source: /note="Description of Combined DNA/RNA Molecule: Synthetic oligonucleotide"
aggaccacuucuucuuuuutt

SEQ ID NO: 1383 - DNA, 21 bp, Artificial Sequence
  source: /note="Description of Artificial Sequence: Synthetic oligonucleotide"
  source: /note="Description of Combined DNA/RNA Molecule: Synthetic oligonucleotide"
auggaccacuucuucuuuutt

SEQ ID NO: 1384 - DNA, 21 bp, Artificial Sequence
  source: /note="Description of Artificial Sequence: Synthetic oligonucleotide"
  source: /note="Description of Combined DNA/RNA Molecule: Synthetic oligonucleotide"
auuggaccacuucuucuuutt

SEQ ID NO: 1385 - DNA, 21 bp, Artificial Sequence
  source: /note="Description of Artificial Sequence: Synthetic oligonucleotide"
  source: /note="Description of Combined DNA/RNA Molecule: Synthetic oligonucleotide"
auuuggaccacuucuucuutt

SEQ ID NO: 1386 - DNA, 21 bp, Artificial Sequence
  source: /note="Description of Artificial Sequence: Synthetic oligonucleotide"
  source: /note="Description of Combined DNA/RNA Molecule: Synthetic oligonucleotide"
acuuuggaccacuucuucutt

SEQ ID NO: 1387 - DNA, 21 bp, Artificial Sequence
  source: /note="Description of Artificial Sequence: Synthetic oligonucleotide"
  source: /note="Description of Combined DNA/RNA Molecule: Synthetic oligonucleotide"
accuuuggaccacuucuuctt

SEQ ID NO: 1388 - DNA, 21 bp, Artificial Sequence
  source: /note="Description of Artificial Sequence: Synthetic oligonucleotide"
  source: /note="Description of Combined DNA/RNA Molecule: Synthetic oligonucleotide"
agccuuuggaccacuucuutt

SEQ ID NO: 1389 - DNA, 21 bp, Artificial Sequence
  source: /note="Description of Artificial Sequence: Synthetic oligonucleotide"
  source: /note="Description of Combined DNA/RNA Molecule: Synthetic oligonucleotide"
augccuuuggaccacuucutt

SEQ ID NO: 1390 - DNA, 21 bp, Artificial Sequence
  source: /note="Description of Artificial Sequence: Synthetic oligonucleotide"
  source: /note="Description of Combined DNA/RNA Molecule: Synthetic oligonucleotide"
auugccuuuggaccacuuctt

SEQ ID NO: 1391 - DNA, 21 bp, Artificial Sequence
  source: /note="Description of Artificial Sequence: Synthetic oligonucleotide"
  source: /note="Description of Combined DNA/RNA Molecule: Synthetic oligonucleotide"
auuugccuuuggaccacuutt

SEQ ID NO: 1392 - DNA, 21 bp, Artificial Sequence
  source: /note="Description of Artificial Sequence: Synthetic oligonucleotide"
  source: /note="Description of Combined DNA/RNA Molecule: Synthetic oligonucleotide"
acuuugccuuuggaccacutt

SEQ ID NO: 1393 - DNA, 21 bp, Artificial Sequence
  source: /note="Description of Artificial Sequence: Synthetic oligonucleotide"
  source: /note="Description of Combined DNA/RNA Molecule: Synthetic oligonucleotide"
aacuuugccuuuggaccactt

SEQ ID NO: 1394 - DNA, 21 bp, Artificial Sequence
  source: /note="Description of Artificial Sequence: Synthetic oligonucleotide"
  source: /note="Description of Combined DNA/RNA Molecule: Synthetic oligonucleotide"
aaacuuugccuuuggaccatt

SEQ ID NO: 1395 - DNA, 21 bp, Artificial Sequence
  source: /note="Description of Artificial Sequence: Synthetic oligonucleotide"
  source: /note="Description of Combined DNA/RNA Molecule: Synthetic oligonucleotide"
agaacuuugccuuuggacctt

SEQ ID NO: 1396 - DNA, 21 bp, Artificial Sequence
  source: /note="Description of Artificial Sequence: Synthetic oligonucleotide"
  source: /note="Description of Combined DNA/RNA Molecule: Synthetic oligonucleotide"
acgaacuuugccuuuggactt

SEQ ID NO: 1397 - DNA, 21 bp, Artificial Sequence
  source: /note="Description of Artificial Sequence: Synthetic oligonucleotide"
  source: /note="Description of Combined DNA/RNA Molecule: Synthetic oligonucleotide"
accgaacuuugccuuuggatt

SEQ ID NO: 1398 - DNA, 21 bp, Artificial Sequence
  source: /note="Description of Artificial Sequence: Synthetic oligonucleotide"
  source: /note="Description of Combined DNA/RNA Molecule: Synthetic oligonucleotide"
acccgaacuuugccuuuggtt

SEQ ID NO: 1399 - DNA, 21 bp, Artificial Sequence
  source: /note="Description of Artificial Sequence: Synthetic oligonucleotide"
  source: /note="Description of Combined DNA/RNA Molecule: Synthetic oligonucleotide"
aucccgaacuuugccuuugtt

SEQ ID NO: 1400 - DNA, 21 bp, Artificial Sequence
  source: /note="Description of Artificial Sequence: Synthetic oligonucleotide"
  source: /note="Description of Combined DNA/RNA Molecule: Synthetic oligonucleotide"
agucccgaacuuugccuuutt

SEQ ID NO: 1401 - DNA, 21 bp, Artificial Sequence
  source: /note="Description of Artificial Sequence: Synthetic oligonucleotide"
  source: /note="Description of Combined DNA/RNA Molecule: Synthetic oligonucleotide"
augucccgaacuuugccuutt

SEQ ID NO: 1402 - DNA, 21 bp, Artificial Sequence
  source: /note="Description of Artificial Sequence: Synthetic oligonucleotide"
  source: /note="Description of Combined DNA/RNA Molecule: Synthetic oligonucleotide"
auugucccgaacuuugccutt

SEQ ID NO: 1403 - DNA, 21 bp, Artificial Sequence
  source: /note="Description of Artificial Sequence: Synthetic oligonucleotide"
  source: /note="Description of Combined DNA/RNA Molecule: Synthetic oligonucleotide"
acuugucccgaacuuugcctt

SEQ ID NO: 1404 - DNA, 21 bp, Artificial Sequence
  source: /note="Description of Artificial Sequence: Synthetic oligonucleotide"
  source: /note="Description of Combined DNA/RNA Molecule: Synthetic oligonucleotide"
agcuugucccgaacuuugctt

SEQ ID NO: 1405 - DNA, 21 bp, Artificial Sequence
  source: /note="Description of Artificial Sequence: Synthetic oligonucleotide"
  source: /note="Description of Combined DNA/RNA Molecule: Synthetic oligonucleotide"
aagcuugucccgaacuuugtt

SEQ ID NO: 1406 - DNA, 21 bp, Artificial Sequence
  source: /note="Description of Artificial Sequence: Synthetic oligonucleotide"
  source: /note="Description of Combined DNA/RNA Molecule: Synthetic oligonucleotide"
agagcuugucccgaacuuutt

SEQ ID NO: 1407 - DNA, 21 bp, Artificial Sequence
  source: /note="Description of Artificial Sequence: Synthetic oligonucleotide"
  source: /note="Description of Combined DNA/RNA Molecule: Synthetic oligonucleotide"
augagcuugucccgaacuutt

SEQ ID NO: 1408 - DNA, 21 bp, Artificial Sequence
  source: /note="Description of Artificial Sequence: Synthetic oligonucleotide"
  source: /note="Description of Combined DNA/RNA Molecule: Synthetic oligonucleotide"
auugagcuugucccgaacutt

SEQ ID NO: 1409 - DNA, 21 bp, Artificial Sequence
  source: /note="Description of Artificial Sequence: Synthetic oligonucleotide"
  source: /note="Description of Combined DNA/RNA Molecule: Synthetic oligonucleotide"
aauugagcuugucccgaactt

SEQ ID NO: 1410 - DNA, 21 bp, Artificial Sequence
  source: /note="Description of Artificial Sequence: Synthetic oligonucleotide"
  source: /note="Description of Combined DNA/RNA Molecule: Synthetic oligonucleotide"
auauugagcuugucccgaatt

SEQ ID NO: 1411 - DNA, 21 bp, Artificial Sequence
  source: /note="Description of Artificial Sequence: Synthetic oligonucleotide"
  source: /note="Description of Combined DNA/RNA Molecule: Synthetic oligonucleotide"
auuauugagcuugucccgatt

SEQ ID NO: 1412 - DNA, 21 bp, Artificial Sequence
  source: /note="Description of Artificial Sequence: Synthetic oligonucleotide"
  source: /note="Description of Combined DNA/RNA Molecule: Synthetic oligonucleotide"
aguuauugagcuugucccgtt

SEQ ID NO: 1413 - DNA, 21 bp, Artificial Sequence
  source: /note="Description of Artificial Sequence: Synthetic oligonucleotide"
  source: /note="Description of Combined DNA/RNA Molecule: Synthetic oligonucleotide"
aaguuauugagcuuguccctt

SEQ ID NO: 1414 - DNA, 21 bp, Artificial Sequence
  source: /note="Description of Artificial Sequence: Synthetic oligonucleotide"
  source: /note="Description of Combined DNA/RNA Molecule: Synthetic oligonucleotide"
aaaguuauugagcuugucctt

SEQ ID NO: 1415 - DNA, 21 bp, Artificial Sequence
  source: /note="Description of Artificial Sequence: Synthetic oligonucleotide"
  source: /note="Description of Combined DNA/RNA Molecule: Synthetic oligonucleotide"
auaaguuauugagcuuguctt

SEQ ID NO: 1416 - DNA, 21 bp, Artificial Sequence
  source: /note="Description of Artificial Sequence: Synthetic oligonucleotide"
  source: /note="Description of Combined DNA/RNA Molecule: Synthetic oligonucleotide"
acuaaguuauugagcuugutt

SEQ ID NO: 1417 - DNA, 21 bp, Artificial Sequence
  source: /note="Description of Artificial Sequence: Synthetic oligonucleotide"
  source: /note="Description of Combined DNA/RNA Molecule: Synthetic oligonucleotide"
aacuaaguuauugagcuugtt

SEQ ID NO: 1418 - DNA, 21 bp, Artificial Sequence
  source: /note="Description of Artificial Sequence: Synthetic oligonucleotide"
  source: /note="Description of Combined DNA/RNA Molecule: Synthetic oligonucleotide"
agacuaaguuauugagcuutt

SEQ ID NO: 1419 - DNA, 21 bp, Artificial Sequence
  source: /note="Description of Artificial Sequence: Synthetic oligonucleotide"
  source: /note="Description of Combined DNA/RNA Molecule: Synthetic oligonucleotide"
aagacuaaguuauugagcutt

SEQ ID NO: 1420 - DNA, 21 bp, Artificial Sequence
  source: /note="Description of Artificial Sequence: Synthetic oligonucleotide"
  source: /note="Description of Combined DNA/RNA Molecule: Synthetic oligonucleotide"
aaagacuaaguuauugagctt

SEQ ID NO: 1421 - DNA, 21 bp, Artificial Sequence
  source: /note="Description of Artificial Sequence: Synthetic oligonucleotide"
  source: /note="Description of Combined DNA/RNA Molecule: Synthetic oligonucleotide"
acaagacuaaguuauugagtt

SEQ ID NO: 1422 - DNA, 21 bp, Artificial Sequence
  source: /note="Description of Artificial Sequence: Synthetic oligonucleotide"
  source: /note="Description of Combined DNA/RNA Molecule: Synthetic oligonucleotide"
aacaagacuaaguuauugatt

SEQ ID NO: 1423 - DNA, 21 bp, Artificial Sequence
  source: /note="Description of Artificial Sequence: Synthetic oligonucleotide"
  source: /note="Description of Combined DNA/RNA Molecule: Synthetic oligonucleotide"
aaacaagacuaaguuauugtt

SEQ ID NO: 1424 - DNA, 21 bp, Artificial Sequence
  source: /note="Description of Artificial Sequence: Synthetic oligonucleotide"
  source: /note="Description of Combined DNA/RNA Molecule: Synthetic oligonucleotide"
aaaacaagacuaaguuauutt

SEQ ID NO: 1425 - DNA, 21 bp, Artificial Sequence
  source: /note="Description of Artificial Sequence: Synthetic oligonucleotide"
  source: /note="Description of Combined DNA/RNA Molecule: Synthetic oligonucleotide"
acaaacaagacuaaguuautt

SEQ ID NO: 1426 - DNA, 21 bp, Artificial Sequence
  source: /note="Description of Artificial Sequence: Synthetic oligonucleotide"
  source: /note="Description of Combined DNA/RNA Molecule: Synthetic oligonucleotide"
aucaaacaagacuaaguuatt

SEQ ID NO: 1427 - DNA, 21 bp, Artificial Sequence
  source: /note="Description of Artificial Sequence: Synthetic oligonucleotide"
  source: /note="Description of Combined DNA/RNA Molecule: Synthetic oligonucleotide"
agucaaacaagacuaaguutt

SEQ ID NO: 1428 - DNA, 21 bp, Artificial Sequence
  source: /note="Description of Artificial Sequence: Synthetic oligonucleotide"
  source: /note="Description of Combined DNA/RNA Molecule: Synthetic oligonucleotide"
augucaaacaagacuaagutt

SEQ ID NO: 1429 - DNA, 21 bp, Artificial Sequence
  source: /note="Description of Artificial Sequence: Synthetic oligonucleotide"
  source: /note="Description of Combined DNA/RNA Molecule: Synthetic oligonucleotide"
auugucaaacaagacuaagtt

SEQ ID NO: 1430 - DNA, 21 bp, Artificial Sequence
  source: /note="Description of Artificial Sequence: Synthetic oligonucleotide"
  source: /note="Description of Combined DNA/RNA Molecule: Synthetic oligonucleotide"
auuugucaaacaagacuaatt

SEQ ID NO: 1431 - DNA, 21 bp, Artificial Sequence
  source: /note="Description of Artificial Sequence: Synthetic oligonucleotide"
  source: /note="Description of Combined DNA/RNA Molecule: Synthetic oligonucleotide"
acuuugucaaacaagacuatt

SEQ ID NO: 1432 - DNA, 21 bp, Artificial Sequence
  source: /note="Description of Artificial Sequence: Synthetic oligonucleotide"
  source: /note="Description of Combined DNA/RNA Molecule: Synthetic oligonucleotide"
agcuuugucaaacaagacutt

SEQ ID NO: 1433 - DNA, 21 bp, Artificial Sequence
  source: /note="Description of Artificial Sequence: Synthetic oligonucleotide"
  source: /note="Description of Combined DNA/RNA Molecule: Synthetic oligonucleotide"
aagcuuugucaaacaagactt

SEQ ID NO: 1434 - DNA, 21 bp, Artificial Sequence
  source: /note="Description of Artificial Sequence: Synthetic oligonucleotide"
  source: /note="Description of Combined DNA/RNA Molecule: Synthetic oligonucleotide"
auagcuuugucaaacaagatt

SEQ ID NO: 1435 - DNA, 21 bp, Artificial Sequence
  source: /note="Description of Artificial Sequence: Synthetic oligonucleotide"
  source: /note="Description of Combined DNA/RNA Molecule: Synthetic oligonucleotide"
aguagcuuugucaaacaagtt

SEQ ID NO: 1436 - DNA, 21 bp, Artificial Sequence
  source: /note="Description of Artificial Sequence: Synthetic oligonucleotide"
  source: /note="Description of Combined DNA/RNA Molecule: Synthetic oligonucleotide"
agguagcuuugucaaacaatt

SEQ ID NO: 1437 - DNA, 21 bp, Artificial Sequence
  source: /note="Description of Artificial Sequence: Synthetic oligonucleotide"
  source: /note="Description of Combined DNA/RNA Molecule: Synthetic oligonucleotide"
aagguagcuuugucaaacatt

SEQ ID NO: 1438 - DNA, 21 bp, Artificial Sequence
  source: /note="Description of Artificial Sequence: Synthetic oligonucleotide"
  source: /note="Description of Combined DNA/RNA Molecule: Synthetic oligonucleotide"
auagguagcuuugucaaactt

SEQ ID NO: 1439 - DNA, 21 bp, Artificial Sequence
  source: /note="Description of Artificial Sequence: Synthetic oligonucleotide"
  source: /note="Description of Combined DNA/RNA Molecule: Synthetic oligonucleotide"
aauagguagcuuugucaaatt

SEQ ID NO: 1440 - DNA, 21 bp, Artificial Sequence
  source: /note="Description of Artificial Sequence: Synthetic oligonucleotide"
  source: /note="Description of Combined DNA/RNA Molecule: Synthetic oligonucleotide"
acauagguagcuuugucaatt

SEQ ID NO: 1441 - DNA, 21 bp, Artificial Sequence
  source: /note="Description of Artificial Sequence: Synthetic oligonucleotide"
  source: /note="Description of Combined DNA/RNA Molecule: Synthetic oligonucleotide"
aucauagguagcuuugucatt

SEQ ID NO: 1442 - DNA, 21 bp, Artificial Sequence
  source: /note="Description of Artificial Sequence: Synthetic oligonucleotide"
  source: /note="Description of Combined DNA/RNA Molecule: Synthetic oligonucleotide"
aaucauagguagcuuuguctt

SEQ ID NO: 1443 - DNA, 21 bp, Artificial Sequence
  source: /note="Description of Artificial Sequence: Synthetic oligonucleotide"
  source: /note="Description of Combined DNA/RNA Molecule: Synthetic oligonucleotide"
auaucauagguagcuuugutt

SEQ ID NO: 1444 - DNA, 21 bp, Artificial Sequence
  source: /note="Description of Artificial Sequence: Synthetic oligonucleotide"
  source: /note="Description of Combined DNA/RNA Molecule: Synthetic oligonucleotide"
auuaucauagguagcuuugtt

SEQ ID NO: 1445 - DNA, 21 bp, Artificial Sequence
  source: /note="Description of Artificial Sequence: Synthetic oligonucleotide"
  source: /note="Description of Combined DNA/RNA Molecule: Synthetic oligonucleotide"
auuuaucauagguagcuuutt

SEQ ID NO: 1446 - DNA, 21 bp, Artificial Sequence
  source: /note="Description of Artificial Sequence: Synthetic oligonucleotide"
  source: /note="Description of Combined DNA/RNA Molecule: Synthetic oligonucleotide"
aguuuaucauagguagcuutt

SEQ ID NO: 1447 - DNA, 21 bp, Artificial Sequence
  source: /note="Description of Artificial Sequence: Synthetic oligonucleotide"
  source: /note="Description of Combined DNA/RNA Molecule: Synthetic oligonucleotide"
aaguuuaucauagguagcutt

SEQ ID NO: 1448 - DNA, 21 bp, Artificial Sequence
  source: /note="Description of Artificial Sequence: Synthetic oligonucleotide"
  source: /note="Description of Combined DNA/RNA Molecule: Synthetic oligonucleotide"
agaguuuaucauagguagctt

SEQ ID NO: 1449 - DNA, 21 bp, Artificial Sequence
  source: /note="Description of Artificial Sequence: Synthetic oligonucleotide"
  source: /note="Description of Combined DNA/RNA Molecule: Synthetic oligonucleotide"
aagaguuuaucauagguagtt

SEQ ID NO: 1450 - DNA, 21 bp, Artificial Sequence
  source: /note="Description of Artificial Sequence: Synthetic oligonucleotide"
  source: /note="Description of Combined DNA/RNA Molecule: Synthetic oligonucleotide"
acagaguuuaucauagguatt

SEQ ID NO: 1451 - DNA, 21 bp, Artificial Sequence
  source: /note="Description of Artificial Sequence: Synthetic oligonucleotide"
  source: /note="Description of Combined DNA/RNA Molecule: Synthetic oligonucleotide"
aacagaguuuaucauaggutt

SEQ ID NO: 1452 - DNA, 21 bp, Artificial Sequence
  source: /note="Description of Artificial Sequence: Synthetic oligonucleotide"
  source: /note="Description of Combined DNA/RNA Molecule: Synthetic oligonucleotide"
auacagaguuuaucauaggtt

SEQ ID NO: 1453 - DNA, 21 bp, Artificial Sequence
  source: /note="Description of Artificial Sequence: Synthetic oligonucleotide"
  source: /note="Description of Combined DNA/RNA Molecule: Synthetic oligonucleotide"
auuacagaguuuaucauagtt

SEQ ID NO: 1454 - DNA, 21 bp, Artificial Sequence
  source: /note="Description of Artificial Sequence: Synthetic oligonucleotide"
  source: /note="Description of Combined DNA/RNA Molecule: Synthetic oligonucleotide"
acuuacagaguuuaucauatt

SEQ ID NO: 1455 - DNA, 21 bp, Artificial Sequence
  source: /note="Description of Artificial Sequence: Synthetic oligonucleotide"
  source: /note="Description of Combined DNA/RNA Molecule: Synthetic oligonucleotide"
accuuacagaguuuaucautt

SEQ ID NO: 1456 - DNA, 21 bp, Artificial Sequence
  source: /note="Description of Artificial Sequence: Synthetic oligonucleotide"
  source: /note="Description of Combined DNA/RNA Molecule: Synthetic oligonucleotide"
auccuuacagaguuuaucatt

SEQ ID NO: 1457 - DNA, 21 bp, Artificial Sequence
  source: /note="Description of Artificial Sequence: Synthetic oligonucleotide"
  source: /note="Description of Combined DNA/RNA Molecule: Synthetic oligonucleotide"
auuccuuacagaguuuauctt

SEQ ID NO: 1458 - DNA, 21 bp, Artificial Sequence
  source: /note="Description of Artificial Sequence: Synthetic oligonucleotide"
  source: /note="Description of Combined DNA/RNA Molecule: Synthetic oligonucleotide"
acuuccuuacagaguuuautt

SEQ ID NO: 1459 - DNA, 21 bp, Artificial Sequence
  source: /note="Description of Artificial Sequence: Synthetic oligonucleotide"
  source: /note="Description of Combined DNA/RNA Molecule: Synthetic oligonucleotide"
aacuuccuuacagaguuuatt

SEQ ID NO: 1460 - DNA, 21 bp, Artificial Sequence
  source: /note="Description of Artificial Sequence: Synthetic oligonucleotide"
  source: /note="Description of Combined DNA/RNA Molecule: Synthetic oligonucleotide"
aaacuuccuuacagaguuutt

SEQ ID NO: 1461 - DNA, 21 bp, Artificial Sequence
  source: /note="Description of Artificial Sequence: Synthetic oligonucleotide"
  source: /note="Description of Combined DNA/RNA Molecule: Synthetic oligonucleotide"
agaacuuccuuacagaguutt

SEQ ID NO: 1462 - DNA, 21 bp, Artificial Sequence
  source: /note="Description of Artificial Sequence: Synthetic oligonucleotide"
  source: /note="Description of Combined DNA/RNA Molecule: Synthetic oligonucleotide"
aggaacuuccuuacagagutt

SEQ ID NO: 1463 - DNA, 21 bp, Artificial Sequence
  source: /note="Description of Artificial Sequence: Synthetic oligonucleotide"
  source: /note="Description of Combined DNA/RNA Molecule: Synthetic oligonucleotide"
agggaacuuccuuacagagtt

SEQ ID NO: 1464 - DNA, 21 bp, Artificial Sequence
  source: /note="Description of Artificial Sequence: Synthetic oligonucleotide"
  source: /note="Description of Combined DNA/RNA Molecule: Synthetic oligonucleotide"
augggaacuuccuuacagatt

SEQ ID NO: 1465 - DNA, 21 bp, Artificial Sequence
  source: /note="Description of Artificial Sequence: Synthetic oligonucleotide"
  source: /note="Description of Combined DNA/RNA Molecule: Synthetic oligonucleotide"
auugggaacuuccuuacagtt

SEQ ID NO: 1466 - DNA, 21 bp, Artificial Sequence
  source: /note="Description of Artificial Sequence: Synthetic oligonucleotide"
  source: /note="Description of Combined DNA/RNA Molecule: Synthetic oligonucleotide"
aguugggaacuuccuuacatt

SEQ ID NO: 1467 - DNA, 21 bp, Artificial Sequence
  source: /note="Description of Artificial Sequence: Synthetic oligonucleotide"
  source: /note="Description of Combined DNA/RNA Molecule: Synthetic oligonucleotide"
aaguugggaacuuccuuactt

SEQ ID NO: 1468 - DNA, 21 bp, Artificial Sequence
  source: /note="Description of Artificial Sequence: Synthetic oligonucleotide"
  source: /note="Description of Combined DNA/RNA Molecule: Synthetic oligonucleotide"
auaguugggaacuuccuuatt

SEQ ID NO: 1469 - DNA, 21 bp, Artificial Sequence
  source: /note="Description of Artificial Sequence: Synthetic oligonucleotide"
  source: /note="Description of Combined DNA/RNA Molecule: Synthetic oligonucleotide"
aauaguugggaacuuccuutt

SEQ ID NO: 1470 - DNA, 21 bp, Artificial Sequence
  source: /note="Description of Artificial Sequence: Synthetic oligonucleotide"
  source: /note="Description of Combined DNA/RNA Molecule: Synthetic oligonucleotide"
auauaguugggaacuuccutt

SEQ ID NO: 1471 - DNA, 21 bp, Artificial Sequence
  source: /note="Description of Artificial Sequence: Synthetic oligonucleotide"
  source: /note="Description of Combined DNA/RNA Molecule: Synthetic oligonucleotide"
auuauaguugggaacuucctt

SEQ ID NO: 1472 - DNA, 21 bp, Artificial Sequence
  source: /note="Description of Artificial Sequence: Synthetic oligonucleotide"
  source: /note="Description of Combined DNA/RNA Molecule: Synthetic oligonucleotide"
auuuauaguugggaacuuctt

SEQ ID NO: 1473 - DNA, 21 bp, Artificial Sequence
  source: /note="Description of Artificial Sequence: Synthetic oligonucleotide"
  source: /note="Description of Combined DNA/RNA Molecule: Synthetic oligonucleotide"
aguuuauaguugggaacuutt

SEQ ID NO: 1474 - DNA, 21 bp, Artificial Sequence
  source: /note="Description of Artificial Sequence: Synthetic oligonucleotide"
  source: /note="Description of Combined DNA/RNA Molecule: Synthetic oligonucleotide"
aaguuuauaguugggaacutt

SEQ ID NO: 1475 - DNA, 21 bp, Artificial Sequence
  source: /note="Description of Artificial Sequence: Synthetic oligonucleotide"
  source: /note="Description of Combined DNA/RNA Molecule: Synthetic oligonucleotide"
aaaguuuauaguugggaactt

SEQ ID NO: 1476 - DNA, 21 bp, Artificial Sequence
  source: /note="Description of Artificial Sequence: Synthetic oligonucleotide"
  source: /note="Description of Combined DNA/RNA Molecule: Synthetic oligonucleotide"
auaaguuuauaguugggaatt

SEQ ID NO: 1477 - DNA, 21 bp, Artificial Sequence
  source: /note="Description of Artificial Sequence: Synthetic oligonucleotide"
  source: /note="Description of Combined DNA/RNA Molecule: Synthetic oligonucleotide"
aauaaguuuauaguugggatt

SEQ ID NO: 1478 - DNA, 21 bp, Artificial Sequence
  source: /note="Description of Artificial Sequence: Synthetic oligonucleotide"
  source: /note="Description of Combined DNA/RNA Molecule: Synthetic oligonucleotide"
auauaaguuuauaguugggtt

SEQ ID NO: 1479 - DNA, 21 bp, Artificial Sequence
  source: /note="Description of Artificial Sequence: Synthetic oligonucleotide"
  source: /note="Description of Combined DNA/RNA Molecule: Synthetic oligonucleotide"
auuauaaguuuauaguuggtt

SEQ ID NO: 1480 - DNA, 21 bp, Artificial Sequence
  source: /note="Description of Artificial Sequence: Synthetic oligonucleotide"
  source: /note="Description of Combined DNA/RNA Molecule: Synthetic oligonucleotide"
aguuauaaguuuauaguugtt

SEQ ID NO: 1481 - DNA, 21 bp, Artificial Sequence
  source: /note="Description of Artificial Sequence: Synthetic oligonucleotide"
  source: /note="Description of Combined DNA/RNA Molecule: Synthetic oligonucleotide"
agguuauaaguuuauaguutt

SEQ ID NO: 1482 - DNA, 21 bp, Artificial Sequence
  source: /note="Description of Artificial Sequence: Synthetic oligonucleotide"
  source: /note="Description of Combined DNA/RNA Molecule: Synthetic oligonucleotide"
aucagagaccacagcugggtt

SEQ ID NO: 1483 - DNA, 21 bp, Artificial Sequence
  source: /note="Description of Artificial Sequence: Synthetic oligonucleotide"
  source: /note="Description of Combined DNA/RNA Molecule: Synthetic oligonucleotide"
acucagagaccacagcuggtt

SEQ ID NO: 1484 - DNA, 21 bp, Artificial Sequence
  source: /note="Description of Artificial Sequence: Synthetic oligonucleotide"
  source: /note="Description of Combined DNA/RNA Molecule: Synthetic oligonucleotide"
aucucagagaccacagcugtt

SEQ ID NO: 1485 - DNA, 21 bp, Artificial Sequence
  source: /note="Description of Artificial Sequence: Synthetic oligonucleotide"
  source: /note="Description of Combined DNA/RNA Molecule: Synthetic oligonucleotide"
acucucagagaccacagcutt

SEQ ID NO: 1486 - DNA, 21 bp, Artificial Sequence
  source: /note="Description of Artificial Sequence: Synthetic oligonucleotide"
  source: /note="Description of Combined DNA/RNA Molecule: Synthetic oligonucleotide"
aucucucagagaccacagctt

SEQ ID NO: 1487 - DNA, 21 bp, Artificial Sequence
  source: /note="Description of Artificial Sequence: Synthetic oligonucleotide"
  source: /note="Description of Combined DNA/RNA Molecule: Synthetic oligonucleotide"
agucucucagagaccacagtt

SEQ ID NO: 1488 - DNA, 21 bp, Artificial Sequence
  source: /note="Description of Artificial Sequence: Synthetic oligonucleotide"
  source: /note="Description of Combined DNA/RNA Molecule: Synthetic oligonucleotide"
aagucucucagagaccacatt

SEQ ID NO: 1489 - DNA, 21 bp, Artificial Sequence
  source: /note="Description of Artificial Sequence: Synthetic oligonucleotide"
  source: /note="Description of Combined DNA/RNA Molecule: Synthetic oligonucleotide"
acagucucucagagaccactt

SEQ ID NO: 1490 - DNA, 21 bp, Artificial Sequence
  source: /note="Description of Artificial Sequence: Synthetic oligonucleotide"
  source: /note="Description of Combined DNA/RNA Molecule: Synthetic oligonucleotide"
aucagucucucagagaccatt

SEQ ID NO: 1491 - DNA, 21 bp, Artificial Sequence
  source: /note="Description of Artificial Sequence: Synthetic oligonucleotide"
  source: /note="Description of Combined DNA/RNA Molecule: Synthetic oligonucleotide"
auucagucucucagagacctt

SEQ ID NO: 1492 - DNA, 21 bp, Artificial Sequence
  source: /note="Description of Artificial Sequence: Synthetic oligonucleotide"
  source: /note="Description of Combined DNA/RNA Molecule: Synthetic oligonucleotide"
acuucagucucucagagactt

SEQ ID NO: 1493 - DNA, 21 bp, Artificial Sequence
  source: /note="Description of Artificial Sequence: Synthetic oligonucleotide"
  source: /note="Description of Combined DNA/RNA Molecule: Synthetic oligonucleotide"
aucuucagucucucagagatt

SEQ ID NO: 1494 - DNA, 21 bp, Artificial Sequence
  source: /note="Description of Artificial Sequence: Synthetic oligonucleotide"
  source: /note="Description of Combined DNA/RNA Molecule: Synthetic oligonucleotide"
aaucuucagucucucagagtt

SEQ ID NO: 1495 - DNA, 21 bp, Artificial Sequence
  source: /note="Description of Artificial Sequence: Synthetic oligonucleotide"
  source: /note="Description of Combined DNA/RNA Molecule: Synthetic oligonucleotide"
aaaucuucagucucucagatt

SEQ ID NO: 1496 - DNA, 21 bp, Artificial Sequence
  source: /note="Description of Artificial Sequence: Synthetic oligonucleotide"
  source: /note="Description of Combined DNA/RNA Molecule: Synthetic oligonucleotide"
agaaucuucagucucucagtt

SEQ ID NO: 1497 - DNA, 21 bp, Artificial Sequence
  source: /note="Description of Artificial Sequence: Synthetic oligonucleotide"
  source: /note="Description of Combined DNA/RNA Molecule: Synthetic oligonucleotide"
acgaaucuucagucucucatt

SEQ ID NO: 1498 - DNA, 21 bp, Artificial Sequence
  source: /note="Description of Artificial Sequence: Synthetic oligonucleotide"
  source: /note="Description of Combined DNA/RNA Molecule: Synthetic oligonucleotide"
aucgaaucuucagucucuctt

SEQ ID NO: 1499 - DNA, 21 bp, Artificial Sequence
  source: /note="Description of Artificial Sequence: Synthetic oligonucleotide"
  source: /note="Description of Combined DNA/RNA Molecule: Synthetic oligonucleotide"
acucgaaucuucagucucutt

SEQ ID NO: 1500 - DNA, 21 bp, Artificial Sequence
  source: /note="Description of Artificial Sequence: Synthetic oligonucleotide"
  source: /note="Description of Combined DNA/RNA Molecule: Synthetic oligonucleotide"
accucgaaucuucagucuctt

SEQ ID NO: 1501 - DNA, 21 bp, Artificial Sequence
  source: /note="Description of Artificial Sequence: Synthetic oligonucleotide"
  source: /note="Description of Combined DNA/RNA Molecule: Synthetic oligonucleotide"
agccucgaaucuucagucutt

SEQ ID NO: 1502 - DNA, 21 bp, Artificial Sequence
  source: /note="Description of Artificial Sequence: Synthetic oligonucleotide"
  source: /note="Description of Combined DNA/RNA Molecule: Synthetic oligonucleotide"
aagccucgaaucuucaguctt

SEQ ID NO: 1503 - DNA, 21 bp, Artificial Sequence
  source: /note="Description of Artificial Sequence: Synthetic oligonucleotide"
  source: /note="Description of Combined DNA/RNA Molecule: Synthetic oligonucleotide"
agagccucgaaucuucagutt

SEQ ID NO: 1504 - DNA, 21 bp, Artificial Sequence
  source: /note="Description of Artificial Sequence: Synthetic oligonucleotide"
  source: /note="Description of Combined DNA/RNA Molecule: Synthetic oligonucleotide"
aggagccucgaaucuucagtt

SEQ ID NO: 1505 - DNA, 21 bp, Artificial Sequence
  source: /note="Description of Artificial Sequence: Synthetic oligonucleotide"
  source: /note="Description of Combined DNA/RNA Molecule: Synthetic oligonucleotide"
agggagccucgaaucuucatt

SEQ ID NO: 1506 - DNA, 21 bp, Artificial Sequence
  source: /note="Description of Artificial Sequence: Synthetic oligonucleotide"
  source: /note="Description of Combined DNA/RNA Molecule: Synthetic oligonucleotide"
aagggagccucgaaucuuctt

SEQ ID NO: 1507 - DNA, 21 bp, Artificial Sequence
  source: /note="Description of Artificial Sequence: Synthetic oligonucleotide"
  source: /note="Description of Combined DNA/RNA Molecule: Synthetic oligonucleotide"
acagggagccucgaaucuutt

SEQ ID NO: 1508 - DNA, 21 bp, Artificial Sequence
  source: /note="Description of Artificial Sequence: Synthetic oligonucleotide"
  source: /note="Description of Combined DNA/RNA Molecule: Synthetic oligonucleotide"
accagggagccucgaaucutt

SEQ ID NO: 1509 - DNA, 21 bp, Artificial Sequence
  source: /note="Description of Artificial Sequence: Synthetic oligonucleotide"
  source: /note="Description of Combined DNA/RNA Molecule: Synthetic oligonucleotide"
agccagggagccucgaauctt

SEQ ID NO: 1510 - DNA, 21 bp, Artificial Sequence
  source: /note="Description of Artificial Sequence: Synthetic oligonucleotide"
  source: /note="Description of Combined DNA/RNA Molecule: Synthetic oligonucleotide"
aggccagggagccucgaautt

SEQ ID NO: 1511 - DNA, 21 bp, Artificial Sequence
  source: /note="Description of Artificial Sequence: Synthetic oligonucleotide"
  source: /note="Description of Combined DNA/RNA Molecule: Synthetic oligonucleotide"
auggccagggagccucgaatt

SEQ ID NO: 1512 - DNA, 21 bp, Artificial Sequence
  source: /note="Description of Artificial Sequence: Synthetic oligonucleotide"
  source: /note="Description of Combined DNA/RNA Molecule: Synthetic oligonucleotide"
acuggccagggagccucgatt

SEQ ID NO: 1513 - DNA, 21 bp, Artificial Sequence
  source: /note="Description of Artificial Sequence: Synthetic oligonucleotide"
  source: /note="Description of Combined DNA/RNA Molecule: Synthetic oligonucleotide"
aaagggcugcccuggccagtt

SEQ ID NO: 1514 - DNA, 21 bp, Artificial Sequence
  source: /note="Description of Artificial Sequence: Synthetic oligonucleotide"
  source: /note="Description of Combined DNA/RNA Molecule: Synthetic oligonucleotide"
agaagggcugcccuggccatt

SEQ ID NO: 1515 - DNA, 21 bp, Artificial Sequence
  source: /note="Description of Artificial Sequence: Synthetic oligonucleotide"
  source: /note="Description of Combined DNA/RNA Molecule: Synthetic oligonucleotide"
augaagggcugcccuggcctt

SEQ ID NO: 1516 - DNA, 21 bp, Artificial Sequence
  source: /note="Description of Artificial Sequence: Synthetic oligonucleotide"
  source: /note="Description of Combined DNA/RNA Molecule: Synthetic oligonucleotide"
acugaagggcugcccuggctt

SEQ ID NO: 1517 - DNA, 21 bp, Artificial Sequence
  source: /note="Description of Artificial Sequence: Synthetic oligonucleotide"
  source: /note="Description of Combined DNA/RNA Molecule: Synthetic oligonucleotide"
accugaagggcugcccuggtt

SEQ ID NO: 1518 - DNA, 21 bp, Artificial Sequence
  source: /note="Description of Artificial Sequence: Synthetic oligonucleotide"
  source: /note="Description of Combined DNA/RNA Molecule: Synthetic oligonucleotide"
auccugaagggcugcccugtt

SEQ ID NO: 1519 - DNA, 21 bp, Artificial Sequence
  source: /note="Description of Artificial Sequence: Synthetic oligonucleotide"
  source: /note="Description of Combined DNA/RNA Molecule: Synthetic oligonucleotide"
acuccugaagggcugcccutt

SEQ ID NO: 1520 - DNA, 21 bp, Artificial Sequence
  source: /note="Description of Artificial Sequence: Synthetic oligonucleotide"
  source: /note="Description of Combined DNA/RNA Molecule: Synthetic oligonucleotide"
agcuccugaagggcugccctt

SEQ ID NO: 1521 - DNA, 21 bp, Artificial Sequence
  source: /note="Description of Artificial Sequence: Synthetic oligonucleotide"
  source: /note="Description of Combined DNA/RNA Molecule: Synthetic oligonucleotide"
aagcuccugaagggcugcctt

SEQ ID NO: 1522 - DNA, 21 bp, Artificial Sequence
  source: /note="Description of Artificial Sequence: Synthetic oligonucleotide"
  source: /note="Description of Combined DNA/RNA Molecule: Synthetic oligonucleotide"
agagcuccugaagggcugctt

SEQ ID NO: 1523 - DNA, 21 bp, Artificial Sequence
  source: /note="Description of Artificial Sequence: Synthetic oligonucleotide"
  source: /note="Description of Combined DNA/RNA Molecule: Synthetic oligonucleotide"
aggagcuccugaagggcugtt

SEQ ID NO: 1524 - DNA, 21 bp, Artificial Sequence
  source: /note="Description of Artificial Sequence: Synthetic oligonucleotide"
  source: /note="Description of Combined DNA/RNA Molecule: Synthetic oligonucleotide"
aaggagcuccugaagggcutt

SEQ ID NO: 1525 - DNA, 21 bp, Artificial Sequence
  source: /note="Description of Artificial Sequence: Synthetic oligonucleotide"
  source: /note="Description of Combined DNA/RNA Molecule: Synthetic oligonucleotide"
aaaggagcuccugaagggctt

SEQ ID NO: 1526 - DNA, 21 bp, Artificial Sequence
  source: /note="Description of Artificial Sequence: Synthetic oligonucleotide"
  source: /note="Description of Combined DNA/RNA Molecule: Synthetic oligonucleotide"
auaaggagcuccugaagggtt

SEQ ID NO: 1527 - DNA, 21 bp, Artificial Sequence
  source: /note="Description of Artificial Sequence: Synthetic oligonucleotide"
  source: /note="Description of Combined DNA/RNA Molecule: Synthetic oligonucleotide"
acuaaggagcuccugaaggtt

SEQ ID NO: 1528 - DNA, 21 bp, Artificial Sequence
  source: /note="Description of Artificial Sequence: Synthetic oligonucleotide"
  source: /note="Description of Combined DNA/RNA Molecule: Synthetic oligonucleotide"
aacuaaggagcuccugaagtt

SEQ ID NO: 1529 - DNA, 21 bp, Artificial Sequence
  source: /note="Description of Artificial Sequence: Synthetic oligonucleotide"
  source: /note="Description of Combined DNA/RNA Molecule: Synthetic oligonucleotide"
auacuaaggagcuccugaatt

SEQ ID NO: 1530 - DNA, 21 bp, Artificial Sequence
  source: /note="Description of Artificial Sequence: Synthetic oligonucleotide"
  source: /note="Description of Combined DNA/RNA Molecule: Synthetic oligonucleotide"
auuacuaaggagcuccugatt

SEQ ID NO: 1531 - DNA, 21 bp, Artificial Sequence
  source: /note="Description of Artificial Sequence: Synthetic oligonucleotide"
  source: /note="Description of Combined DNA/RNA Molecule: Synthetic oligonucleotide"
auuuacuaaggagcuccugtt

SEQ ID NO: 1532 - DNA, 21 bp, Artificial Sequence
  source: /note="Description of Artificial Sequence: Synthetic oligonucleotide"
  source: /note="Description of Combined DNA/RNA Molecule: Synthetic oligonucleotide"
acuuuacuaaggagcuccutt

SEQ ID NO: 1533 - DNA, 21 bp, Artificial Sequence
  source: /note="Description of Artificial Sequence: Synthetic oligonucleotide"
  source: /note="Description of Combined DNA/RNA Molecule: Synthetic oligonucleotide"
accuuuacuaaggagcucctt

SEQ ID NO: 1534 - DNA, 21 bp, Artificial Sequence
  source: /note="Description of Artificial Sequence: Synthetic oligonucleotide"
  source: /note="Description of Combined DNA/RNA Molecule: Synthetic oligonucleotide"
auccuuuacuaaggagcuctt

SEQ ID NO: 1535 - DNA, 21 bp, Artificial Sequence
  source: /note="Description of Artificial Sequence: Synthetic oligonucleotide"
  source: /note="Description of Combined DNA/RNA Molecule: Synthetic oligonucleotide"
aguccuuuacuaaggagcutt

SEQ ID NO: 1536 - DNA, 21 bp, Artificial Sequence
  source: /note="Description of Artificial Sequence: Synthetic oligonucleotide"
  source: /note="Description of Combined DNA/RNA Molecule: Synthetic oligonucleotide"
aaguccuuuacuaaggagctt

SEQ ID NO: 1537 - DNA, 21 bp, Artificial Sequence
  source: /note="Description of Artificial Sequence: Synthetic oligonucleotide"
  source: /note="Description of Combined DNA/RNA Molecule: Synthetic oligonucleotide"
aaaguccuuuacuaaggagtt

SEQ ID NO: 1538 - DNA, 21 bp, Artificial Sequence
  source: /note="Description of Artificial Sequence: Synthetic oligonucleotide"
  source: /note="Description of Combined DNA/RNA Molecule: Synthetic oligonucleotide"
auaaguccuuuacuaaggatt

SEQ ID NO: 1539 - DNA, 21 bp, Artificial Sequence
  source: /note="Description of Artificial Sequence: Synthetic oligonucleotide"
  source: /note="Description of Combined DNA/RNA Molecule: Synthetic oligonucleotide"
aauaaguccuuuacuaaggtt

SEQ ID NO: 1540 - DNA, 21 bp, Artificial Sequence
  source: /note="Description of Artificial Sequence: Synthetic oligonucleotide"
  source: /note="Description of Combined DNA/RNA Molecule: Synthetic oligonucleotide"
agauaaguccuuuacuaagtt

SEQ ID NO: 1541 - DNA, 21 bp, Artificial Sequence
  source: /note="Description of Artificial Sequence: Synthetic oligonucleotide"
  source: /note="Description of Combined DNA/RNA Molecule: Synthetic oligonucleotide"
augauaaguccuuuacuaatt

SEQ ID NO: 1542 - DNA, 21 bp, Artificial Sequence
  source: /note="Description of Artificial Sequence: Synthetic oligonucleotide"
  source: /note="Description of Combined DNA/RNA Molecule: Synthetic oligonucleotide"
auugauaaguccuuuacuatt

SEQ ID NO: 1543 - DNA, 21 bp, Artificial Sequence
  source: /note="Description of Artificial Sequence: Synthetic oligonucleotide"
  source: /note="Description of Combined DNA/RNA Molecule: Synthetic oligonucleotide"
auuugauaaguccuuuacutt

SEQ ID NO: 1544 - DNA, 21 bp, Artificial Sequence
  source: /note="Description of Artificial Sequence: Synthetic oligonucleotide"
  source: /note="Description of Combined DNA/RNA Molecule: Synthetic oligonucleotide"
aguuugauaaguccuuuactt

SEQ ID NO: 1545 - DNA, 21 bp, Artificial Sequence
  source: /note="Description of Artificial Sequence: Synthetic oligonucleotide"
  source: /note="Description of Combined DNA/RNA Molecule: Synthetic oligonucleotide"
aaguuugauaaguccuuuatt

SEQ ID NO: 1546 - DNA, 21 bp, Artificial Sequence
  source: /note="Description of Artificial Sequence: Synthetic oligonucleotide"
  source: /note="Description of Combined DNA/RNA Molecule: Synthetic oligonucleotide"
acaguuugauaaguccuuutt

SEQ ID NO: 1547 - DNA, 21 bp, Artificial Sequence
  source: /note="Description of Artificial Sequence: Synthetic oligonucleotide"
  source: /note="Description of Combined DNA/RNA Molecule: Synthetic oligonucleotide"
accaguuugauaaguccuutt

SEQ ID NO: 1548 - DNA, 21 bp, Artificial Sequence
  source: /note="Description of Artificial Sequence: Synthetic oligonucleotide"
  source: /note="Description of Combined DNA/RNA Molecule: Synthetic oligonucleotide"
aaccaguuugauaaguccutt

SEQ ID NO: 1549 - DNA, 21 bp, Artificial Sequence
  source: /note="Description of Artificial Sequence: Synthetic oligonucleotide"
  source: /note="Description of Combined DNA/RNA Molecule: Synthetic oligonucleotide"
aaaccaguuugauaagucctt

SEQ ID NO: 1550 - DNA, 21 bp, Artificial Sequence
  source: /note="Description of Artificial Sequence: Synthetic oligonucleotide"
  source: /note="Description of Combined DNA/RNA Molecule: Synthetic oligonucleotide"
aaaaccaguuugauaaguctt

SEQ ID NO: 1551 - DNA, 21 bp, Artificial Sequence
  source: /note="Description of Artificial Sequence: Synthetic oligonucleotide"
  source: /note="Description of Combined DNA/RNA Molecule: Synthetic oligonucleotide"
agaaaccaguuugauaagutt

SEQ ID NO: 1552 - DNA, 21 bp, Artificial Sequence
  source: /note="Description of Artificial Sequence: Synthetic oligonucleotide"
  source: /note="Description of Combined DNA/RNA Molecule: Synthetic oligonucleotide"
augaaaccaguuugauaagtt

SEQ ID NO: 1553 - DNA, 21 bp, Artificial Sequence
  source: /note="Description of Artificial Sequence: Synthetic oligonucleotide"
  source: /note="Description of Combined DNA/RNA Molecule: Synthetic oligonucleotide"
auugaaaccaguuugauaatt

SEQ ID NO: 1554 - DNA, 21 bp, Artificial Sequence
  source: /note="Description of Artificial Sequence: Synthetic oligonucleotide"
  source: /note="Description of Combined DNA/RNA Molecule: Synthetic oligonucleotide"
auuugaaaccaguuugauatt

SEQ ID NO: 1555 - DNA, 21 bp, Artificial Sequence
  source: /note="Description of Artificial Sequence: Synthetic oligonucleotide"
  source: /note="Description of Combined DNA/RNA Molecule: Synthetic oligonucleotide"
acuuugaaaccaguuugautt

SEQ ID NO: 1556 - DNA, 21 bp, Artificial Sequence
  source: /note="Description of Artificial Sequence: Synthetic oligonucleotide"
  source: /note="Description of Combined DNA/RNA Molecule: Synthetic oligonucleotide"
agcuuugaaaccaguuugatt

SEQ ID NO: 1557 - DNA, 21 bp, Artificial Sequence
  source: /note="Description of Artificial Sequence: Synthetic oligonucleotide"
  source: /note="Description of Combined DNA/RNA Molecule: Synthetic oligonucleotide"
augcuuugaaaccaguuugtt

SEQ ID NO: 1558 - DNA, 21 bp, Artificial Sequence
  source: /note="Description of Artificial Sequence: Synthetic oligonucleotide"
  source: /note="Description of Combined DNA/RNA Molecule: Synthetic oligonucleotide"
agugcuuugaaaccaguuutt

SEQ ID NO: 1559 - DNA, 21 bp, Artificial Sequence
  source: /note="Description of Artificial Sequence: Synthetic oligonucleotide"
  source: /note="Description of Combined DNA/RNA Molecule: Synthetic oligonucleotide"
augugcuuugaaaccaguutt

SEQ ID NO: 1560 - DNA, 21 bp, Artificial Sequence
  source: /note="Description of Artificial Sequence: Synthetic oligonucleotide"
  source: /note="Description of Combined DNA/RNA Molecule: Synthetic oligonucleotide"
acugugcuuugaaaccagutt

SEQ ID NO: 1561 - DNA, 21 bp, Artificial Sequence
  source: /note="Description of Artificial Sequence: Synthetic oligonucleotide"
  source: /note="Description of Combined DNA/RNA Molecule: Synthetic oligonucleotide"
aucugugcuuugaaaccagtt

SEQ ID NO: 1562 - DNA, 21 bp, Artificial Sequence
  source: /note="Description of Artificial Sequence: Synthetic oligonucleotide"
  source: /note="Description of Combined DNA/RNA Molecule: Synthetic oligonucleotide"
acucugugcuuugaaaccatt

SEQ ID NO: 1563 - DNA, 21 bp, Artificial Sequence
  source: /note="Description of Artificial Sequence: Synthetic oligonucleotide"
  source: /note="Description of Combined DNA/RNA Molecule: Synthetic oligonucleotide"
agcucugugcuuugaaacctt

SEQ ID NO: 1564 - DNA, 21 bp, Artificial Sequence
  source: /note="Description of Artificial Sequence: Synthetic oligonucleotide"
  source: /note="Description of Combined DNA/RNA Molecule: Synthetic oligonucleotide"
aagcucugugcuuugaaactt

SEQ ID NO: 1565 - DNA, 21 bp, Artificial Sequence
  source: /note="Description of Artificial Sequence: Synthetic oligonucleotide"
  source: /note="Description of Combined DNA/RNA Molecule: Synthetic oligonucleotide"
agagcucugugcuuugaaatt

SEQ ID NO: 1566 - DNA, 21 bp, Artificial Sequence
  source: /note="Description of Artificial Sequence: Synthetic oligonucleotide"
  source: /note="Description of Combined DNA/RNA Molecule: Synthetic oligonucleotide"
augagcucugugcuuugaatt

SEQ ID NO: 1567 - DNA, 21 bp, Artificial Sequence
  source: /note="Description of Artificial Sequence: Synthetic oligonucleotide"
  source: /note="Description of Combined DNA/RNA Molecule: Synthetic oligonucleotide"
auugagcucugugcuuugatt

SEQ ID NO: 1568 - DNA, 21 bp, Artificial Sequence
  source: /note="Description of Artificial Sequence: Synthetic oligonucleotide"
  source: /note="Description of Combined DNA/RNA Molecule: Synthetic oligonucleotide"
acuugagcucugugcuuugtt

SEQ ID NO: 1569 - DNA, 21 bp, Artificial Sequence
  source: /note="Description of Artificial Sequence: Synthetic oligonucleotide"
  source: /note="Description of Combined DNA/RNA Molecule: Synthetic oligonucleotide"
aacuugagcucugugcuuutt

SEQ ID NO: 1570 - DNA, 21 bp, Artificial Sequence
  source: /note="Description of Artificial Sequence: Synthetic oligonucleotide"
  source: /note="Description of Combined DNA/RNA Molecule: Synthetic oligonucleotide"
auacuugagcucugugcuutt

SEQ ID NO: 1571 - DNA, 21 bp, Artificial Sequence
  source: /note="Description of Artificial Sequence: Synthetic oligonucleotide"
  source: /note="Description of Combined DNA/RNA Molecule: Synthetic oligonucleotide"
auuacuugagcucugugcutt

SEQ ID NO: 1572 - DNA, 21 bp, Artificial Sequence
  source: /note="Description of Artificial Sequence: Synthetic oligonucleotide"
  source: /note="Description of Combined DNA/RNA Molecule: Synthetic oligonucleotide"
aauuacuugagcucugugctt

SEQ ID NO: 1573 - DNA, 21 bp, Artificial Sequence
  source: /note="Description of Artificial Sequence: Synthetic oligonucleotide"
  source: /note="Description of Combined DNA/RNA Molecule: Synthetic oligonucleotide"
aaauuacuugagcucugugtt

SEQ ID NO: 1574 - DNA, 21 bp, Artificial Sequence
  source: /note="Description of Artificial Sequence: Synthetic oligonucleotide"
  source: /note="Description of Combined DNA/RNA Molecule: Synthetic oligonucleotide"
aaaauuacuugagcucugutt

SEQ ID NO: 1575 - DNA, 21 bp, Artificial Sequence
  source: /note="Description of Artificial Sequence: Synthetic oligonucleotide"
  source: /note="Description of Combined DNA/RNA Molecule: Synthetic oligonucleotide"
auaaauuacuugagcucugtt

SEQ ID NO: 1576 - DNA, 21 bp, Artificial Sequence
  source: /note="Description of Artificial Sequence: Synthetic oligonucleotide"
  source: /note="Description of Combined DNA/RNA Molecule: Synthetic oligonucleotide"
aguaaauuacuugagcucutt

SEQ ID NO: 1577 - DNA, 21 bp, Artificial Sequence
  source: /note="Description of Artificial Sequence: Synthetic oligonucleotide"
  source: /note="Description of Combined DNA/RNA Molecule: Synthetic oligonucleotide"
auguaaauuacuugagcuctt

SEQ ID NO: 1578 - DNA, 21 bp, Artificial Sequence
  source: /note="Description of Artificial Sequence: Synthetic oligonucleotide"
  source: /note="Description of Combined DNA/RNA Molecule: Synthetic oligonucleotide"
aguguaaauuacuugagcutt

SEQ ID NO: 1579 - DNA, 21 bp, Artificial Sequence
  source: /note="Description of Artificial Sequence: Synthetic oligonucleotide"
  source: /note="Description of Combined DNA/RNA Molecule: Synthetic oligonucleotide"
agguguaaauuacuugagctt

SEQ ID NO: 1580 - DNA, 21 bp, Artificial Sequence
  source: /note="Description of Artificial Sequence: Synthetic oligonucleotide"
  source: /note="Description of Combined DNA/RNA Molecule: Synthetic oligonucleotide"
augguguaaauuacuugagtt

SEQ ID NO: 1581 - DNA, 21 bp, Artificial Sequence
  source: /note="Description of Artificial Sequence: Synthetic oligonucleotide"
  source: /note="Description of Combined DNA/RNA Molecule: Synthetic oligonucleotide"
acugguguaaauuacuugatt

SEQ ID NO: 1582 - DNA, 21 bp, Artificial Sequence
  source: /note="Description of Artificial Sequence: Synthetic oligonucleotide"
  source: /note="Description of Combined DNA/RNA Molecule: Synthetic oligonucleotide"
aucugguguaaauuacuugtt

SEQ ID NO: 1583 - DNA, 21 bp, Artificial Sequence
  source: /note="Description of Artificial Sequence: Synthetic oligonucleotide"
  source: /note="Description of Combined DNA/RNA Molecule: Synthetic oligonucleotide"
auucugguguaaauuacuutt

SEQ ID NO: 1584 - DNA, 21 bp, Artificial Sequence
  source: /note="Description of Artificial Sequence: Synthetic oligonucleotide"
  source: /note="Description of Combined DNA/RNA Molecule: Synthetic oligonucleotide"
auuucugguguaaauuacutt

SEQ ID NO: 1585 - DNA, 21 bp, Artificial Sequence
  source: /note="Description of Artificial Sequence: Synthetic oligonucleotide"
  source: /note="Description of Combined DNA/RNA Molecule: Synthetic oligonucleotide"
aauuucugguguaaauuactt

SEQ ID NO: 1586 - DNA, 21 bp, Artificial Sequence
  source: /note="Description of Artificial Sequence: Synthetic oligonucleotide"
  source: /note="Description of Combined DNA/RNA Molecule: Synthetic oligonucleotide"
auauuucugguguaaauuatt

SEQ ID NO: 1587 - DNA, 21 bp, Artificial Sequence
  source: /note="Description of Artificial Sequence: Synthetic oligonucleotide"
  source: /note="Description of Combined DNA/RNA Molecule: Synthetic oligonucleotide"
aguauuucugguguaaauutt

SEQ ID NO: 1588 - DNA, 21 bp, Artificial Sequence
  source: /note="Description of Artificial Sequence: Synthetic oligonucleotide"
  source: /note="Description of Combined DNA/RNA Molecule: Synthetic oligonucleotide"
agguauuucugguguaaautt

SEQ ID NO: 1589 - DNA, 21 bp, Artificial Sequence
  source: /note="Description of Artificial Sequence: Synthetic oligonucleotide"
  source: /note="Description of Combined DNA/RNA Molecule: Synthetic oligonucleotide"
augguauuucugguguaaatt

SEQ ID NO: 1590 - DNA, 21 bp, Artificial Sequence
  source: /note="Description of Artificial Sequence: Synthetic oligonucleotide"
  source: /note="Description of Combined DNA/RNA Molecule: Synthetic oligonucleotide"
auugguauuucugguguaatt

SEQ ID NO: 1591 - DNA, 21 bp, Artificial Sequence
  source: /note="Description of Artificial Sequence: Synthetic oligonucleotide"
  source: /note="Description of Combined DNA/RNA Molecule: Synthetic oligonucleotide"
acuugguauuucugguguatt

SEQ ID NO: 1592 - DNA, 21 bp, Artificial Sequence
  source: /note="Description of Artificial Sequence: Synthetic oligonucleotide"
  source: /note="Description of Combined DNA/RNA Molecule: Synthetic oligonucleotide"
accuugguauuucuggugutt

SEQ ID NO: 1593 - DNA, 21 bp, Artificial Sequence
  source: /note="Description of Artificial Sequence: Synthetic oligonucleotide"
  source: /note="Description of Combined DNA/RNA Molecule: Synthetic oligonucleotide"
acccuugguauuucuggugtt

SEQ ID NO: 1594 - DNA, 21 bp, Artificial Sequence
  source: /note="Description of Artificial Sequence: Synthetic oligonucleotide"
  source: /note="Description of Combined DNA/RNA Molecule: Synthetic oligonucleotide"
aacccuugguauuucuggutt

SEQ ID NO: 1595 - DNA, 21 bp, Artificial Sequence
  source: /note="Description of Artificial Sequence: Synthetic oligonucleotide"
  source: /note="Description of Combined DNA/RNA Molecule: Synthetic oligonucleotide"
acacccuugguauuucuggtt

SEQ ID NO: 1596 - DNA, 21 bp, Artificial Sequence
  source: /note="Description of Artificial Sequence: Synthetic oligonucleotide"
  source: /note="Description of Combined DNA/RNA Molecule: Synthetic oligonucleotide"
accacccuugguauuucugtt

SEQ ID NO: 1597 - DNA, 21 bp, Artificial Sequence
  source: /note="Description of Artificial Sequence: Synthetic oligonucleotide"
  source: /note="Description of Combined DNA/RNA Molecule: Synthetic oligonucleotide"
auccacccuugguauuucutt

SEQ ID NO: 1598 - DNA, 21 bp, Artificial Sequence
  source: /note="Description of Artificial Sequence: Synthetic oligonucleotide"
  source: /note="Description of Combined DNA/RNA Molecule: Synthetic oligonucleotide"
acuccacccuugguauuuctt

SEQ ID NO: 1599 - DNA, 21 bp, Artificial Sequence
  source: /note="Description of Artificial Sequence: Synthetic oligonucleotide"
  source: /note="Description of Combined DNA/RNA Molecule: Synthetic oligonucleotide"
aucuccacccuugguauuutt

SEQ ID NO: 1600 - DNA, 21 bp, Artificial Sequence
  source: /note="Description of Artificial Sequence: Synthetic oligonucleotide"
  source: /note="Description of Combined DNA/RNA Molecule: Synthetic oligonucleotide"
aaucuccacccuugguauutt

SEQ ID NO: 1601 - DNA, 21 bp, Artificial Sequence
  source: /note="Description of Artificial Sequence: Synthetic oligonucleotide"
  source: /note="Description of Combined DNA/RNA Molecule: Synthetic oligonucleotide"
acaucuccacccuugguautt

SEQ ID NO: 1602 - DNA, 21 bp, Artificial Sequence
  source: /note="Description of Artificial Sequence: Synthetic oligonucleotide"
  source: /note="Description of Combined DNA/RNA Molecule: Synthetic oligonucleotide"
agcaucuccacccuugguatt

SEQ ID NO: 1603 - DNA, 21 bp, Artificial Sequence
  source: /note="Description of Artificial Sequence: Synthetic oligonucleotide"
  source: /note="Description of Combined DNA/RNA Molecule: Synthetic oligonucleotide"
aagcaucuccacccuuggutt

SEQ ID NO: 1604 - DNA, 21 bp, Artificial Sequence
  source: /note="Description of Artificial Sequence: Synthetic oligonucleotide"
  source: /note="Description of Combined DNA/RNA Molecule: Synthetic oligonucleotide"
agagcaucuccacccuuggtt

SEQ ID NO: 1605 - DNA, 21 bp, Artificial Sequence
  source: /note="Description of Artificial Sequence: Synthetic oligonucleotide"
  source: /note="Description of Combined DNA/RNA Molecule: Synthetic oligonucleotide"
aggagcaucuccacccuugtt

SEQ ID NO: 1606 - DNA, 21 bp, Artificial Sequence
  source: /note="Description of Artificial Sequence: Synthetic oligonucleotide"
  source: /note="Description of Combined DNA/RNA Molecule: Synthetic oligonucleotide"
auggagcaucuccacccuutt

SEQ ID NO: 1607 - DNA, 21 bp, Artificial Sequence
  source: /note="Description of Artificial Sequence: Synthetic oligonucleotide"
  source: /note="Description of Combined DNA/RNA Molecule: Synthetic oligonucleotide"
acuggagcaucuccacccutt

SEQ ID NO: 1608 - DNA, 21 bp, Artificial Sequence
  source: /note="Description of Artificial Sequence: Synthetic oligonucleotide"
  source: /note="Description of Combined DNA/RNA Molecule: Synthetic oligonucleotide"
agcuggagcaucuccaccctt

SEQ ID NO: 1609 - DNA, 21 bp, Artificial Sequence
  source: /note="Description of Artificial Sequence: Synthetic oligonucleotide"
  source: /note="Description of Combined DNA/RNA Molecule: Synthetic oligonucleotide"
aagcuggagcaucuccacctt

SEQ ID NO: 1610 - DNA, 21 bp, Artificial Sequence
  source: /note="Description of Artificial Sequence: Synthetic oligonucleotide"
  source: /note="Description of Combined DNA/RNA Molecule: Synthetic oligonucleotide"
acagcuggagcaucuccactt

SEQ ID NO: 1611 - DNA, 21 bp, Artificial Sequence
  source: /note="Description of Artificial Sequence: Synthetic oligonucleotide"
  source: /note="Description of Combined DNA/RNA Molecule: Synthetic oligonucleotide"
agcagcuggagcaucuccatt

SEQ ID NO: 1612 - DNA, 21 bp, Artificial Sequence
  source: /note="Description of Artificial Sequence: Synthetic oligonucleotide"
  source: /note="Description of Combined DNA/RNA Molecule: Synthetic oligonucleotide"
aagcagcuggagcaucucctt

SEQ ID NO: 1613 - DNA, 21 bp, Artificial Sequence
  source: /note="Description of Artificial Sequence: Synthetic oligonucleotide"
  source: /note="Description of Combined DNA/RNA Molecule: Synthetic oligonucleotide"
acagcagcuggagcaucuctt

SEQ ID NO: 1614 - DNA, 21 bp, Artificial Sequence
  source: /note="Description of Artificial Sequence: Synthetic oligonucleotide"
  source: /note="Description of Combined DNA/RNA Molecule: Synthetic oligonucleotide"
accagcagcuggagcaucutt

SEQ ID NO: 1615 - DNA, 21 bp, Artificial Sequence
  source: /note="Description of Artificial Sequence: Synthetic oligonucleotide"
  source: /note="Description of Combined DNA/RNA Molecule: Synthetic oligonucleotide"
aaccagcagcuggagcauctt

SEQ ID NO: 1616 - DNA, 21 bp, Artificial Sequence
  source: /note="Description of Artificial Sequence: Synthetic oligonucleotide"
  source: /note="Description of Combined DNA/RNA Molecule: Synthetic oligonucleotide"
acaccagcagcuggagcautt

SEQ ID NO: 1617 - DNA, 21 bp, Artificial Sequence
  source: /note="Description of Artificial Sequence: Synthetic oligonucleotide"
  source: /note="Description of Combined DNA/RNA Molecule: Synthetic oligonucleotide"
aucaccagcagcuggagcatt

SEQ ID NO: 1618 - DNA, 21 bp, Artificial Sequence
  source: /note="Description of Artificial Sequence: Synthetic oligonucleotide"
  source: /note="Description of Combined DNA/RNA Molecule: Synthetic oligonucleotide"
auucaccagcagcuggagctt

SEQ ID NO: 1619 - DNA, 21 bp, Artificial Sequence
  source: /note="Description of Artificial Sequence: Synthetic oligonucleotide"
  source: /note="Description of Combined DNA/RNA Molecule: Synthetic oligonucleotide"
acuucaccagcagcuggagtt

SEQ ID NO: 1620 - DNA, 21 bp, Artificial Sequence
  source: /note="Description of Artificial Sequence: Synthetic oligonucleotide"
  source: /note="Description of Combined DNA/RNA Molecule: Synthetic oligonucleotide"
aucuucaccagcagcuggatt

SEQ ID NO: 1621 - DNA, 21 bp, Artificial Sequence
  source: /note="Description of Artificial Sequence: Synthetic oligonucleotide"
  source: /note="Description of Combined DNA/RNA Molecule: Synthetic oligonucleotide"
aaucuucaccagcagcuggtt

SEQ ID NO: 1622 - DNA, 21 bp, Artificial Sequence
  source: /note="Description of Artificial Sequence: Synthetic oligonucleotide"
  source: /note="Description of Combined DNA/RNA Molecule: Synthetic oligonucleotide"
acaucuucaccagcagcugtt

SEQ ID NO: 1623 - DNA, 21 bp, Artificial Sequence
  source: /note="Description of Artificial Sequence: Synthetic oligonucleotide"
  source: /note="Description of Combined DNA/RNA Molecule: Synthetic oligonucleotide"
agcaucuucaccagcagcutt

SEQ ID NO: 1624 - DNA, 21 bp, Artificial Sequence
  source: /note="Description of Artificial Sequence: Synthetic oligonucleotide"
  source: /note="Description of Combined DNA/RNA Molecule: Synthetic oligonucleotide"
augcaucuucaccagcagctt

SEQ ID NO: 1625 - DNA, 21 bp, Artificial Sequence
  source: /note="Description of Artificial Sequence: Synthetic oligonucleotide"
  source: /note="Description of Combined DNA/RNA Molecule: Synthetic oligonucleotide"
aaugcaucuucaccagcagtt

SEQ ID NO: 1626 - DNA, 21 bp, Artificial Sequence
  source: /note="Description of Artificial Sequence: Synthetic oligonucleotide"
  source: /note="Description of Combined DNA/RNA Molecule: Synthetic oligonucleotide"
acaugcaucuucaccagcatt

SEQ ID NO: 1627 - DNA, 21 bp, Artificial Sequence
  source: /note="Description of Artificial Sequence: Synthetic oligonucleotide"
  source: /note="Description of Combined DNA/RNA Molecule: Synthetic oligonucleotide"
aucaugcaucuucaccagctt

SEQ ID NO: 1628 - DNA, 21 bp, Artificial Sequence
  source: /note="Description of Artificial Sequence: Synthetic oligonucleotide"
  source: /note="Description of Combined DNA/RNA Molecule: Synthetic oligonucleotide"
auucaugcaucuucaccagtt

SEQ ID NO: 1629 - DNA, 21 bp, Artificial Sequence
  source: /note="Description of Artificial Sequence: Synthetic oligonucleotide"
  source: /note="Description of Combined DNA/RNA Molecule: Synthetic oligonucleotide"
aauucaugcaucuucaccatt

SEQ ID NO: 1630 - DNA, 21 bp, Artificial Sequence
  source: /note="Description of Artificial Sequence: Synthetic oligonucleotide"
  source: /note="Description of Combined DNA/RNA Molecule: Synthetic oligonucleotide"
auauucaugcaucuucacctt

SEQ ID NO: 1631 - DNA, 21 bp, Artificial Sequence
  source: /note="Description of Artificial Sequence: Synthetic oligonucleotide"
  source: /note="Description of Combined DNA/RNA Molecule: Synthetic oligonucleotide"
acuauucaugcaucuucactt

SEQ ID NO: 1632 - DNA, 21 bp, Artificial Sequence
  source: /note="Description of Artificial Sequence: Synthetic oligonucleotide"
  source: /note="Description of Combined DNA/RNA Molecule: Synthetic oligonucleotide"
accuauucaugcaucuucatt

SEQ ID NO: 1633 - DNA, 21 bp, Artificial Sequence
  source: /note="Description of Artificial Sequence: Synthetic oligonucleotide"
  source: /note="Description of Combined DNA/RNA Molecule: Synthetic oligonucleotide"
aaccuauucaugcaucuuctt

SEQ ID NO: 1634 - DNA, 21 bp, Artificial Sequence
  source: /note="Description of Artificial Sequence: Synthetic oligonucleotide"
  source: /note="Description of Combined DNA/RNA Molecule: Synthetic oligonucleotide"
agaccuauucaugcaucuutt

SEQ ID NO: 1635 - DNA, 21 bp, Artificial Sequence
  source: /note="Description of Artificial Sequence: Synthetic oligonucleotide"
  source: /note="Description of Combined DNA/RNA Molecule: Synthetic oligonucleotide"
aggaccuauucaugcaucutt

SEQ ID NO: 1636 - DNA, 21 bp, Artificial Sequence
  source: /note="Description of Artificial Sequence: Synthetic oligonucleotide"
  source: /note="Description of Combined DNA/RNA Molecule: Synthetic oligonucleotide"
auggaccuauucaugcauctt

SEQ ID NO: 1637 - DNA, 21 bp, Artificial Sequence
  source: /note="Description of Artificial Sequence: Synthetic oligonucleotide"
  source: /note="Description of Combined DNA/RNA Molecule: Synthetic oligonucleotide"
auuggaccuauucaugcautt

SEQ ID NO: 1638 - DNA, 21 bp, Artificial Sequence
  source: /note="Description of Artificial Sequence: Synthetic oligonucleotide"
  source: /note="Description of Combined DNA/RNA Molecule: Synthetic oligonucleotide"
aguuggaccuauucaugcatt

SEQ ID NO: 1639 - DNA, 21 bp, Artificial Sequence
  source: /note="Description of Artificial Sequence: Synthetic oligonucleotide"
  source: /note="Description of Combined DNA/RNA Molecule: Synthetic oligonucleotide"
agguuggaccuauucaugctt

SEQ ID NO: 1640 - DNA, 21 bp, Artificial Sequence
  source: /note="Description of Artificial Sequence: Synthetic oligonucleotide"
  source: /note="Description of Combined DNA/RNA Molecule: Synthetic oligonucleotide"
augguuggaccuauucaugtt

SEQ ID NO: 1641 - DNA, 21 bp, Artificial Sequence
  source: /note="Description of Artificial Sequence: Synthetic oligonucleotide"
  source: /note="Description of Combined DNA/RNA Molecule: Synthetic oligonucleotide"
acugguuggaccuauucautt

SEQ ID NO: 1642 - DNA, 21 bp, Artificial Sequence
  source: /note="Description of Artificial Sequence: Synthetic oligonucleotide"
  source: /note="Description of Combined DNA/RNA Molecule: Synthetic oligonucleotide"
agcugguuggaccuauucatt

SEQ ID NO: 1643 - DNA, 21 bp, Artificial Sequence
  source: /note="Description of Artificial Sequence: Synthetic oligonucleotide"
  source: /note="Description of Combined DNA/RNA Molecule: Synthetic oligonucleotide"
aagcugguuggaccuauuctt

SEQ ID NO: 1644 - DNA, 21 bp, Artificial Sequence
  source: /note="Description of Artificial Sequence: Synthetic oligonucleotide"
  source: /note="Description of Combined DNA/RNA Molecule: Synthetic oligonucleotide"
acagcugguuggaccuauutt

SEQ ID NO: 1645 - DNA, 21 bp, Artificial Sequence
  source: /note="Description of Artificial Sequence: Synthetic oligonucleotide"
  source: /note="Description of Combined DNA/RNA Molecule: Synthetic oligonucleotide"
aacagcugguuggaccuautt

SEQ ID NO: 1646 - DNA, 21 bp, Artificial Sequence
  source: /note="Description of Artificial Sequence: Synthetic oligonucleotide"
  source: /note="Description of Combined DNA/RNA Molecule: Synthetic oligonucleotide"
auacagcugguuggaccuatt

SEQ ID NO: 1647 - DNA, 21 bp, Artificial Sequence
  source: /note="Description of Artificial Sequence: Synthetic oligonucleotide"
  source: /note="Description of Combined DNA/RNA Molecule: Synthetic oligonucleotide"
aguacagcugguuggaccutt

SEQ ID NO: 1648 - DNA, 21 bp, Artificial Sequence
  source: /note="Description of Artificial Sequence: Synthetic oligonucleotide"
  source: /note="Description of Combined DNA/RNA Molecule: Synthetic oligonucleotide"
auguacagcugguuggacctt

SEQ ID NO: 1649 - DNA, 21 bp, Artificial Sequence
  source: /note="Description of Artificial Sequence: Synthetic oligonucleotide"
  source: /note="Description of Combined DNA/RNA Molecule: Synthetic oligonucleotide"
aauguacagcugguuggactt

SEQ ID NO: 1650 - DNA, 21 bp, Artificial Sequence
  source: /note="Description of Artificial Sequence: Synthetic oligonucleotide"
  source: /note="Description of Combined DNA/RNA Molecule: Synthetic oligonucleotide"
aaauguacagcugguuggatt

SEQ ID NO: 1651 - DNA, 21 bp, Artificial Sequence
  source: /note="Description of Artificial Sequence: Synthetic oligonucleotide"
  source: /note="Description of Combined DNA/RNA Molecule: Synthetic oligonucleotide"
aaaauguacagcugguuggtt

SEQ ID NO: 1652 - DNA, 21 bp, Artificial Sequence
  source: /note="Description of Artificial Sequence: Synthetic oligonucleotide"
  source: /note="Description of Combined DNA/RNA Molecule: Synthetic oligonucleotide"
acaaauguacagcugguugtt

SEQ ID NO: 1653 - DNA, 21 bp, Artificial Sequence
  source: /note="Description of Artificial Sequence: Synthetic oligonucleotide"
  source: /note="Description of Combined DNA/RNA Molecule: Synthetic oligonucleotide"
accaaauguacagcugguutt

SEQ ID NO: 1654 - DNA, 21 bp, Artificial Sequence
  source: /note="Description of Artificial Sequence: Synthetic oligonucleotide"
  source: /note="Description of Combined DNA/RNA Molecule: Synthetic oligonucleotide"
auccaaauguacagcuggutt

SEQ ID NO: 1655 - DNA, 21 bp, Artificial Sequence
  source: /note="Description of Artificial Sequence: Synthetic oligonucleotide"
  source: /note="Description of Combined DNA/RNA Molecule: Synthetic oligonucleotide"
auuccaaauguacagcuggtt

SEQ ID NO: 1656 - DNA, 21 bp, Artificial Sequence
  source: /note="Description of Artificial Sequence: Synthetic oligonucleotide"
  source: /note="Description of Combined DNA/RNA Molecule: Synthetic oligonucleotide"
auuuccaaauguacagcugtt

SEQ ID NO: 1657 - DNA, 21 bp, Artificial Sequence
  source: /note="Description of Artificial Sequence: Synthetic oligonucleotide"
  source: /note="Description of Combined DNA/RNA Molecule: Synthetic oligonucleotide"
auuuuccaaauguacagcutt

SEQ ID NO: 1658 - DNA, 21 bp, Artificial Sequence
  source: /note="Description of Artificial Sequence: Synthetic oligonucleotide"
  source: /note="Description of Combined DNA/RNA Molecule: Synthetic oligonucleotide"
auuuuuccaaauguacagctt

SEQ ID NO: 1659 - DNA, 21 bp, Artificial Sequence
  source: /note="Description of Artificial Sequence: Synthetic oligonucleotide"
  source: /note="Description of Combined DNA/RNA Molecule: Synthetic oligonucleotide"
aauuuuuccaaauguacagtt

SEQ ID NO: 1660 - DNA, 21 bp, Artificial Sequence
  source: /note="Description of Artificial Sequence: Synthetic oligonucleotide"
  source: /note="Description of Combined DNA/RNA Molecule: Synthetic oligonucleotide"
auauuuuuccaaauguacatt

SEQ ID NO: 1661 - DNA, 21 bp, Artificial Sequence
  source: /note="Description of Artificial Sequence: Synthetic oligonucleotide"
  source: /note="Description of Combined DNA/RNA Molecule: Synthetic oligonucleotide"
auuauuuuuccaaauguactt

SEQ ID NO: 1662 - DNA, 21 bp, Artificial Sequence
  source: /note="Description of Artificial Sequence: Synthetic oligonucleotide"
  source: /note="Description of Combined DNA/RNA Molecule: Synthetic oligonucleotide"
aguuuuauuuuuccaaaugtt

SEQ ID NO: 1663 - RNA, 19 nt, Artificial Sequence
  source: /note="Description of Artificial Sequence: Synthetic oligonucleotide"
cuuuuuguccgacaucuug

SEQ ID NO: 1664 - RNA, 19 nt, Artificial Sequence
  source: /note="Description of Artificial Sequence: Synthetic oligonucleotide"
uuuuguccgacaucuugac

SEQ ID NO: 1665 - RNA, 19 nt, Artificial Sequence
  source: /note="Description of Artificial Sequence: Synthetic oligonucleotide"
uguccgacaucuugacgag

SEQ ID NO: 1666 - RNA, 19 nt, Artificial Sequence
  source: /note="Description of Artificial Sequence: Synthetic oligonucleotide"
acaucuugacgaggcugcg

SEQ ID NO: 1667 - RNA, 19 nt, Artificial Sequence
  source: /note="Description of Artificial Sequence: Synthetic oligonucleotide"
gaggcugcggugucugcug

SEQ ID NO: 1668 - RNA, 19 nt, Artificial Sequence
  source: /note="Description of Artificial Sequence: Synthetic oligonucleotide"
gcugcggugucugcugcua

SEQ ID NO: 1669 - RNA, 19 nt, Artificial Sequence
  source: /note="Description of Artificial Sequence: Synthetic oligonucleotide"
gugucugcugcuauucucc

SEQ ID NO: 1670 - RNA, 19 nt, Artificial Sequence
  source: /note="Description of Artificial Sequence: Synthetic oligonucleotide"
gucugcugcuauucuccga

SEQ ID NO: 1671 - RNA, 19 nt, Artificial Sequence
  source: /note="Description of Artificial Sequence: Synthetic oligonucleotide"
uauucuccgagcuucgcaa

SEQ ID NO: 1672 - RNA, 19 nt, Artificial Sequence
  source: /note="Description of Artificial Sequence: Synthetic oligonucleotide"
ucuccgagcuucgcaaugc

SEQ ID NO: 1673 - RNA, 19 nt, Artificial Sequence
  source: /note="Description of Artificial Sequence: Synthetic oligonucleotide"
ccgagcuucgcaaugccgc

SEQ ID NO: 1674 - RNA, 19 nt, Artificial Sequence
  source: /note="Description of Artificial Sequence: Synthetic oligonucleotide"
cuucgcaaugccgccuaag

SEQ ID NO: 1675 - RNA, 19 nt, Artificial Sequence
  source: /note="Description of Artificial Sequence: Synthetic oligonucleotide"
uucgcaaugccgccuaagg

SEQ ID NO: 1676 - RNA, 19 nt, Artificial Sequence
  source: /note="Description of Artificial Sequence: Synthetic oligonucleotide"
augccgccuaaggacgaca

SEQ ID NO: 1677 - RNA, 19 nt, Artificial Sequence
  source: /note="Description of Artificial Sequence: Synthetic oligonucleotide"
gccgccuaaggacgacaag

SEQ ID NO: 1678 - RNA, 19 nt, Artificial Sequence
  source: /note="Description of Artificial Sequence: Synthetic oligonucleotide"
cgccuaaggacgacaagaa

SEQ ID NO: 1679 - DNA, 19 bp, Artificial Sequence
  source: /note="Description of Artificial Sequence: Synthetic oligonucleotide"
aggacgacaagaagaagaa

SEQ ID NO: 1680 - DNA, 19 bp, Artificial Sequence
  source: /note="Description of Artificial Sequence: Synthetic oligonucleotide"
ggacgacaagaagaagaag

SEQ ID NO: 1681 - DNA, 19 bp, Artificial Sequence
  source: /note="Description of Artificial Sequence: Synthetic oligonucleotide"
acaagaagaagaaggacgc

SEQ ID NO: 1682 - RNA, 19 nt, Artificial Sequence
  source: /note="Description of Artificial Sequence: Synthetic oligonucleotide"
agaagaagaaggacgcugg

SEQ ID NO: 1683 - RNA, 19 nt, Artificial Sequence
  source: /note="Description of Artificial Sequence: Synthetic oligonucleotide"
gaagaaggacgcuggaaag

SEQ ID NO: 1684 - RNA, 19 nt, Artificial Sequence
  source: /note="Description of Artificial Sequence: Synthetic oligonucleotide"
agaaggacgcuggaaaguc

SEQ ID NO: 1685 - RNA, 19 nt, Artificial Sequence
  source: /note="Description of Artificial Sequence: Synthetic oligonucleotide"
acgcuggaaagucggccaa

SEQ ID NO: 1686 - RNA, 19 nt, Artificial Sequence
  source: /note="Description of Artificial Sequence: Synthetic oligonucleotide"
cuggaaagucggccaagaa

SEQ ID NO: 1687 - RNA, 19 nt, Artificial Sequence
  source: /note="Description of Artificial Sequence: Synthetic oligonucleotide"
ggaaagucggccaagaaag

SEQ ID NO: 1688 - RNA, 19 nt, Artificial Sequence
  source: /note="Description of Artificial Sequence: Synthetic oligonucleotide"
gucggccaagaaagacaaa

SEQ ID NO: 1689 - DNA, 19 bp, Artificial Sequence
  source: /note="Description of Artificial Sequence: Synthetic oligonucleotide"
cggccaagaaagacaaaga

SEQ ID NO: 1690 - DNA, 19 bp, Artificial Sequence
  source: /note="Description of Artificial Sequence: Synthetic oligonucleotide"
caagaaagacaaagaccca

SEQ ID NO: 1691 - RNA, 19 nt, Artificial Sequence
  source: /note="Description of Artificial Sequence: Synthetic oligonucleotide"
acaaagacccagugaacaa

SEQ ID NO: 1692 - RNA, 19 nt, Artificial Sequence
  source: /note="Description of Artificial Sequence: Synthetic oligonucleotide"
caaagacccagugaacaaa

SEQ ID NO: 1693 - RNA, 19 nt, Artificial Sequence
  source: /note="Description of Artificial Sequence: Synthetic oligonucleotide"
gacccagugaacaaauccg

SEQ ID NO: 1694 - RNA, 19 nt, Artificial Sequence
  source: /note="Description of Artificial Sequence: Synthetic oligonucleotide"
agugaacaaauccgggggc

SEQ ID NO: 1695 - RNA, 19 nt, Artificial Sequence
  source: /note="Description of Artificial Sequence: Synthetic oligonucleotide"
ugaacaaauccgggggcaa

SEQ ID NO: 1696 - RNA, 19 nt, Artificial Sequence
  source: /note="Description of Artificial Sequence: Synthetic oligonucleotide"
acaaauccgggggcaaggc

SEQ ID NO: 1697 - DNA, 19 bp, Artificial Sequence
  source: /note="Description of Artificial Sequence: Synthetic oligonucleotide"
ccgggggcaaggccaaaaa

SEQ ID NO: 1698 - DNA, 19 bp, Artificial Sequence
  source: /note="Description of Artificial Sequence: Synthetic oligonucleotide"
gggcaaggccaaaaagaag

SEQ ID NO: 1699 - DNA, 19 bp, Artificial Sequence
  source: /note="Description of Artificial Sequence: Synthetic oligonucleotide"
gcaaggccaaaaagaagaa

SEQ ID NO: 1700 - RNA, 19 nt, Artificial Sequence
  source: /note="Description of Artificial Sequence: Synthetic oligonucleotide"
ggccaaaaagaagaagugg

SEQ ID NO: 1701 - RNA, 19 nt, Artificial Sequence
  source: /note="Description of Artificial Sequence: Synthetic oligonucleotide"
ccaaaaagaagaagugguc

SEQ ID NO: 1702 - RNA, 19 nt, Artificial Sequence
  source: /note="Description of Artificial Sequence: Synthetic oligonucleotide"
aaaagaagaagugguccaa

SEQ ID NO: 1703 - RNA, 19 nt, Artificial Sequence
  source: /note="Description of Artificial Sequence: Synthetic oligonucleotide"
agaagaagugguccaaagg

SEQ ID NO: 1704 - RNA, 19 nt, Artificial Sequence
  source: /note="Description of Artificial Sequence: Synthetic oligonucleotide"
gguccaaaggcaaaguucg

SEQ ID NO: 1705 - RNA, 19 nt, Artificial Sequence
  source: /note="Description of Artificial Sequence: Synthetic oligonucleotide"
uccaaaggcaaaguucggg

SEQ ID NO: 1706 - RNA, 19 nt, Artificial Sequence
  source: /note="Description of Artificial Sequence: Synthetic oligonucleotide"
aaggcaaaguucgggacaa

SEQ ID NO: 1707 - RNA, 19 nt, Artificial Sequence
  source: /note="Description of Artificial Sequence: Synthetic oligonucleotide"
caaaguucgggacaagcuc

SEQ ID NO: 1708 - RNA, 19 nt, Artificial Sequence
  source: /note="Description of Artificial Sequence: Synthetic oligonucleotide"
uucgggacaagcucaauaa

SEQ ID NO: 1709 - RNA, 19 nt, Artificial Sequence
  source: /note="Description of Artificial Sequence: Synthetic oligonucleotide"
ggacaagcucaauaacuua

SEQ ID NO: 1710 - RNA, 19 nt, Artificial Sequence
  source: /note="Description of Artificial Sequence: Synthetic oligonucleotide"
gcucaauaacuuagucuug

SEQ ID NO: 1711 - RNA, 19 nt, Artificial Sequence
  source: /note="Description of Artificial Sequence: Synthetic oligonucleotide"
aauaacuuagucuuguuug

SEQ ID NO: 1712 - RNA, 19 nt, Artificial Sequence
  source: /note="Description of Artificial Sequence: Synthetic oligonucleotide"
cuuagucuuguuugacaaa

SEQ ID NO: 1713 - RNA, 19 nt, Artificial Sequence
  source: /note="Description of Artificial Sequence: Synthetic oligonucleotide"
cuuguuugacaaagcuacc

SEQ ID NO: 1714 - RNA, 19 nt, Artificial Sequence
  source: /note="Description of Artificial Sequence: Synthetic oligonucleotide"
caaagcuaccuaugauaaa

SEQ ID NO: 1715 - RNA, 19 nt, Artificial Sequence
  source: /note="Description of Artificial Sequence: Synthetic oligonucleotide"
cuaccuaugauaaacucug

SEQ ID NO: 1716 - RNA, 19 nt, Artificial Sequence
  source: /note="Description of Artificial Sequence: Synthetic oligonucleotide"
ccuaugauaaacucuguaa

SEQ ID NO: 1717 - RNA, 19 nt, Artificial Sequence
  source: /note="Description of Artificial Sequence: Synthetic oligonucleotide"
ugauaaacucuguaaggaa

SEQ ID NO: 1718 - RNA, 19 nt, Artificial Sequence
  source: /note="Description of Artificial Sequence: Synthetic oligonucleotide"
aacucuguaaggaaguucc

SEQ ID NO: 1719 - RNA, 19 nt, Artificial Sequence
  source: /note="Description of Artificial Sequence: Synthetic oligonucleotide"
cucuguaaggaaguuccca

SEQ ID NO: 1720 - RNA, 19 nt, Artificial Sequence
  source: /note="Description of Artificial Sequence: Synthetic oligonucleotide"
ggaaguucccaacuauaaa

SEQ ID NO: 1721 - RNA, 19 nt, Artificial Sequence
  source: /note="Description of Artificial Sequence: Synthetic oligonucleotide"
guucccaacuauaaacuua

SEQ ID NO: 1722 - RNA, 19 nt, Artificial Sequence
  source: /note="Description of Artificial Sequence: Synthetic oligonucleotide"
ucccaacuauaaacuuaua

SEQ ID NO: 1723 - RNA, 19 nt, Artificial Sequence
  source: /note="Description of Artificial Sequence: Synthetic oligonucleotide"
caacuauaaacuuauaacc

SEQ ID NO: 1724 - RNA, 19 nt, Artificial Sequence
  source: /note="Description of Artificial Sequence: Synthetic oligonucleotide"
uaaacuuauaaccccagcu

SEQ ID NO: 1725 - RNA, 19 nt, Artificial Sequence
  source: /note="Description of Artificial Sequence: Synthetic oligonucleotide"
aaacuuauaaccccagcug

SEQ ID NO: 1726 - RNA, 19 nt, Artificial Sequence
  source: /note="Description of Artificial Sequence: Synthetic oligonucleotide"
cuuauaaccccagcugugg

SEQ ID NO: 1727 - RNA, 19 nt, Artificial Sequence
  source: /note="Description of Artificial Sequence: Synthetic oligonucleotide"
accccagcuguggucucug

SEQ ID NO: 1728 - RNA, 19 nt, Artificial Sequence
  source: /note="Description of Artificial Sequence: Synthetic oligonucleotide"
ccagcuguggucucugaga

SEQ ID NO: 1729 - RNA, 19 nt, Artificial Sequence
  source: /note="Description of Artificial Sequence: Synthetic oligonucleotide"
uggucucugagagacugaa

SEQ ID NO: 1730 - RNA, 19 nt, Artificial Sequence
  source: /note="Description of Artificial Sequence: Synthetic oligonucleotide"
ucugagagacugaagauuc

SEQ ID NO: 1731 - RNA, 19 nt, Artificial Sequence
  source: /note="Description of Artificial Sequence: Synthetic oligonucleotide"
gagagacugaagauucgag

SEQ ID NO: 1732 - RNA, 19 nt, Artificial Sequence
  source: /note="Description of Artificial Sequence: Synthetic oligonucleotide"
acugaagauucgaggcucc

SEQ ID NO: 1733 - RNA, 19 nt, Artificial Sequence
  source: /note="Description of Artificial Sequence: Synthetic oligonucleotide"
gauucgaggcucccuggcc

SEQ ID NO: 1734 - RNA, 19 nt, Artificial Sequence
  source: /note="Description of Artificial Sequence: Synthetic oligonucleotide"
gaggcucccuggccagggc

SEQ ID NO: 1735 - RNA, 19 nt, Artificial Sequence
  source: /note="Description of Artificial Sequence: Synthetic oligonucleotide"
cucccuggccagggcagcc

SEQ ID NO: 1736 - RNA, 19 nt, Artificial Sequence
  source: /note="Description of Artificial Sequence: Synthetic oligonucleotide"
cuggccagggcagcccuuc

SEQ ID NO: 1737 - RNA, 19 nt, Artificial Sequence
  source: /note="Description of Artificial Sequence: Synthetic oligonucleotide"
ggccagggcagcccuucag

SEQ ID NO: 1738 - RNA, 19 nt, Artificial Sequence
  source: /note="Description of Artificial Sequence: Synthetic oligonucleotide"
gcccuucaggagcuccuua

SEQ ID NO: 1739 - RNA, 19 nt, Artificial Sequence
  source: /note="Description of Artificial Sequence: Synthetic oligonucleotide"
ucaggagcuccuuaguaaa

SEQ ID NO: 1740 - RNA, 19 nt, Artificial Sequence
  source: /note="Description of Artificial Sequence: Synthetic oligonucleotide"
ggagcuccuuaguaaagga

SEQ ID NO: 1741 - RNA, 19 nt, Artificial Sequence
  source: /note="Description of Artificial Sequence: Synthetic oligonucleotide"
cuccuuaguaaaggacuua

SEQ ID NO: 1742 - RNA, 19 nt, Artificial Sequence
  source: /note="Description of Artificial Sequence: Synthetic oligonucleotide"
cuuaguaaaggacuuauca

SEQ ID NO: 1743 - RNA, 19 nt, Artificial Sequence
  source: /note="Description of Artificial Sequence: Synthetic oligonucleotide"
uaguaaaggacuuaucaaa

SEQ ID NO: 1744 - RNA, 19 nt, Artificial Sequence
  source: /note="Description of Artificial Sequence: Synthetic oligonucleotide"
gacuuaucaaacugguuuc

SEQ ID NO: 1745 - RNA, 19 nt, Artificial Sequence
  source: /note="Description of Artificial Sequence: Synthetic oligonucleotide"
cuuaucaaacugguuucaa

SEQ ID NO: 1746 - RNA, 19 nt, Artificial Sequence
  source: /note="Description of Artificial Sequence: Synthetic oligonucleotide"
aucaaacugguuucaaagc

SEQ ID NO: 1747 - RNA, 19 nt, Artificial Sequence
  source: /note="Description of Artificial Sequence: Synthetic oligonucleotide"
acugguuucaaagcacaga

SEQ ID NO: 1748 - RNA, 19 nt, Artificial Sequence
  source: /note="Description of Artificial Sequence: Synthetic oligonucleotide"
uuucaaagcacagagcuca

SEQ ID NO: 1749 - RNA, 19 nt, Artificial Sequence
  source: /note="Description of Artificial Sequence: Synthetic oligonucleotide"
uucaaagcacagagcucaa

SEQ ID NO: 1750 - RNA, 19 nt, Artificial Sequence
  source: /note="Description of Artificial Sequence: Synthetic oligonucleotide"
cagagcucaaguaauuuac

SEQ ID NO: 1751 - RNA, 19 nt, Artificial Sequence
  source: /note="Description of Artificial Sequence: Synthetic oligonucleotide"
agagcucaaguaauuuaca

SEQ ID NO: 1752 - RNA, 19 nt, Artificial Sequence
  source: /note="Description of Artificial Sequence: Synthetic oligonucleotide"
cucaaguaauuuacaccag

SEQ ID NO: 1753 - RNA, 19 nt, Artificial Sequence
  source: /note="Description of Artificial Sequence: Synthetic oligonucleotide"
guaauuuacaccagaaaua

SEQ ID NO: 1754 - RNA, 19 nt, Artificial Sequence
  source: /note="Description of Artificial Sequence: Synthetic oligonucleotide"
uaauuuacaccagaaauac

SEQ ID NO: 1755 - RNA, 19 nt, Artificial Sequence
  source: /note="Description of Artificial Sequence: Synthetic oligonucleotide"
uacaccagaaauaccaagg

SEQ ID NO: 1756 - RNA, 19 nt, Artificial Sequence
  source: /note="Description of Artificial Sequence: Synthetic oligonucleotide"
accagaaauaccaagggug

SEQ ID NO: 1757 - RNA, 19 nt, Artificial Sequence
  source: /note="Description of Artificial Sequence: Synthetic oligonucleotide"
agaaauaccaaggguggag

SEQ ID NO: 1758 - RNA, 19 nt, Artificial Sequence
  source: /note="Description of Artificial Sequence: Synthetic oligonucleotide"
aauaccaaggguggagaug

SEQ ID NO: 1759 - RNA, 19 nt, Artificial Sequence
  source: /note="Description of Artificial Sequence: Synthetic oligonucleotide"
aaggguggagaugcuccag

SEQ ID NO: 1760 - RNA, 19 nt, Artificial Sequence
  source: /note="Description of Artificial Sequence: Synthetic oligonucleotide"
gguggagaugcuccagcug

SEQ ID NO: 1761 - RNA, 19 nt, Artificial Sequence
  source: /note="Description of Artificial Sequence: Synthetic oligonucleotide"
ugcuccagcugcuggugaa

SEQ ID NO: 1762 - RNA, 19 nt, Artificial Sequence
  source: /note="Description of Artificial Sequence: Synthetic oligonucleotide"
gcuccagcugcuggugaag

SEQ ID NO: 1763 - RNA, 19 nt, Artificial Sequence
  source: /note="Description of Artificial Sequence: Synthetic oligonucleotide"
ugcuggugaagaugcauga

SEQ ID NO: 1764 - RNA, 19 nt, Artificial Sequence
  source: /note="Description of Artificial Sequence: Synthetic oligonucleotide"
ggugaagaugcaugaauag

SEQ ID NO: 1765 - RNA, 19 nt, Artificial Sequence
  source: /note="Description of Artificial Sequence: Synthetic oligonucleotide"
gaagaugcaugaauagguc

SEQ ID NO: 1766 - RNA, 19 nt, Artificial Sequence
  source: /note="Description of Artificial Sequence: Synthetic oligonucleotide"
augcaugaauagguccaac

SEQ ID NO: 1767 - RNA, 19 nt, Artificial Sequence
  source: /note="Description of Artificial Sequence: Synthetic oligonucleotide"
gcaugaauagguccaacca

SEQ ID NO: 1768 - RNA, 19 nt, Artificial Sequence
  source: /note="Description of Artificial Sequence: Synthetic oligonucleotide"
ccaaccagcuguacauuug

SEQ ID NO: 1769 - RNA, 19 nt, Artificial Sequence
  source: /note="Description of Artificial Sequence: Synthetic oligonucleotide"
ccagcuguacauuuggaaa

SEQ ID NO: 1770 - RNA, 19 nt, Artificial Sequence
  source: /note="Description of Artificial Sequence: Synthetic oligonucleotide"
guacauuuggaaaaauaaa

SEQ ID NO: 1771 - RNA, 19 nt, Artificial Sequence
  source: /note="Description of Artificial Sequence: Synthetic oligonucleotide"
acauuuggaaaaauaaaac

SEQ ID NO: 1772 - RNA, 19 nt, Artificial Sequence
  source: /note="Description of Artificial Sequence: Synthetic oligonucleotide"
ggaaaaauaaaacuuuauu

SEQ ID NO: 1773 - RNA, 19 nt, Artificial Sequence
  source: /note="Description of Artificial Sequence: Synthetic oligonucleotide"
aaaauaaaacuuuauuaaa

SEQ ID NO: 1774 - RNA, 19 nt, Artificial Sequence
  source: /note="Description of Artificial Sequence: Synthetic oligonucleotide"
caagaugucggacaaaaag

SEQ ID NO: 1775 - RNA, 19 nt, Artificial Sequence
  source: /note="Description of Artificial Sequence: Synthetic oligonucleotide"
gucaagaugucggacaaaa

SEQ ID NO: 1776 - RNA, 19 nt, Artificial Sequence
  source: /note="Description of Artificial Sequence: Synthetic oligonucleotide"
cucgucaagaugucggaca

SEQ ID NO: 1777 - RNA, 19 nt, Artificial Sequence
  source: /note="Description of Artificial Sequence: Synthetic oligonucleotide"
cgcagccucgucaagaugu

SEQ ID NO: 1778 - RNA, 19 nt, Artificial Sequence
  source: /note="Description of Artificial Sequence: Synthetic oligonucleotide"
cagcagacaccgcagccuc

SEQ ID NO: 1779 - RNA, 19 nt, Artificial Sequence
  source: /note="Description of Artificial Sequence: Synthetic oligonucleotide"
uagcagcagacaccgcagc

SEQ ID NO: 1780 - RNA, 19 nt, Artificial Sequence
  source: /note="Description of Artificial Sequence: Synthetic oligonucleotide"
ggagaauagcagcagacac

SEQ ID NO: 1781 - RNA, 19 nt, Artificial Sequence
  source: /note="Description of Artificial Sequence: Synthetic oligonucleotide"
ucggagaauagcagcagac

SEQ ID NO: 1782 - RNA, 19 nt, Artificial Sequence
  source: /note="Description of Artificial Sequence: Synthetic oligonucleotide"
uugcgaagcucggagaaua

SEQ ID NO: 1783 - RNA, 19 nt, Artificial Sequence
  source: /note="Description of Artificial Sequence: Synthetic oligonucleotide"
gcauugcgaagcucggaga

SEQ ID NO: 1784 - RNA, 19 nt, Artificial Sequence
  source: /note="Description of Artificial Sequence: Synthetic oligonucleotide"
gcggcauugcgaagcucgg

SEQ ID NO: 1785 - RNA, 19 nt, Artificial Sequence
  source: /note="Description of Artificial Sequence: Synthetic oligonucleotide"
cuuaggcggcauugcgaag

SEQ ID NO: 1786 - RNA, 19 nt, Artificial Sequence
  source: /note="Description of Artificial Sequence: Synthetic oligonucleotide"
ccuuaggcggcauugcgaa

SEQ ID NO: 1787 - RNA, 19 nt, Artificial Sequence
  source: /note="Description of Artificial Sequence: Synthetic oligonucleotide"
ugucguccuuaggcggcau

SEQ ID NO: 1788 - RNA, 19 nt, Artificial Sequence
  source: /note="Description of Artificial Sequence: Synthetic oligonucleotide"
cuugucguccuuaggcggc

SEQ ID NO: 1789 - RNA, 19 nt, Artificial Sequence
  source: /note="Description of Artificial Sequence: Synthetic oligonucleotide"
uucuugucguccuuaggcg

SEQ ID NO: 1790 - RNA, 19 nt, Artificial Sequence
  source: /note="Description of Artificial Sequence: Synthetic oligonucleotide"
uucuucuucuugucguccu

SEQ ID NO: 1791 - RNA, 19 nt, Artificial Sequence
  source: /note="Description of Artificial Sequence: Synthetic oligonucleotide"
cuucuucuucuugucgucc

SEQ ID NO: 1792 - RNA, 19 nt, Artificial Sequence
  source: /note="Description of Artificial Sequence: Synthetic oligonucleotide"
gcguccuucuucuucuugu

SEQ ID NO: 1793 - RNA, 19 nt, Artificial Sequence
  source: /note="Description of Artificial Sequence: Synthetic oligonucleotide"
ccagcguccuucuucuucu

SEQ ID NO: 1794 - RNA, 19 nt, Artificial Sequence
  source: /note="Description of Artificial Sequence: Synthetic oligonucleotide"
cuuuccagcguccuucuuc

SEQ ID NO: 1795 - RNA, 19 nt, Artificial Sequence
  source: /note="Description of Artificial Sequence: Synthetic oligonucleotide"
gacuuuccagcguccuucu

SEQ ID NO: 1796 - RNA, 19 nt, Artificial Sequence
  source: /note="Description of Artificial Sequence: Synthetic oligonucleotide"
uuggccgacuuuccagcgu

SEQ ID NO: 1797 - RNA, 19 nt, Artificial Sequence
  source: /note="Description of Artificial Sequence: Synthetic oligonucleotide"
uucuuggccgacuuuccag

SEQ ID NO: 1798 - RNA, 19 nt, Artificial Sequence
  source: /note="Description of Artificial Sequence: Synthetic oligonucleotide"
cuuucuuggccgacuuucc

SEQ ID NO: 1799 - RNA, 19 nt, Artificial Sequence
  source: /note="Description of Artificial Sequence: Synthetic oligonucleotide"
uuugucuuucuuggccgac

SEQ ID NO: 1800 - RNA, 19 nt, Artificial Sequence
  source: /note="Description of Artificial Sequence: Synthetic oligonucleotide"
ucuuugucuuucuuggccg

SEQ ID NO: 1801 - RNA, 19 nt, Artificial Sequence
  source: /note="Description of Artificial Sequence: Synthetic oligonucleotide"
ugggucuuugucuuucuug

SEQ ID NO: 1802 - RNA, 19 nt, Artificial Sequence
  source: /note="Description of Artificial Sequence: Synthetic oligonucleotide"
uuguucacugggucuuugu

SEQ ID NO: 1803 - RNA, 19 nt, Artificial Sequence
  source: /note="Description of Artificial Sequence: Synthetic oligonucleotide"
uuuguucacugggucuuug

SEQ ID NO: 1804 - RNA, 19 nt, Artificial Sequence
  source: /note="Description of Artificial Sequence: Synthetic oligonucleotide"
cggauuuguucacuggguc

SEQ ID NO: 1805 - RNA, 19 nt, Artificial Sequence
  source: /note="Description of Artificial Sequence: Synthetic oligonucleotide"
gcccccggauuuguucacu

SEQ ID NO: 1806 - RNA, 19 nt, Artificial Sequence
  source: /note="Description of Artificial Sequence: Synthetic oligonucleotide"
uugcccccggauuuguuca

SEQ ID NO: 1807 - RNA, 19 nt, Artificial Sequence
  source: /note="Description of Artificial Sequence: Synthetic oligonucleotide"
gccuugcccccggauuugu

SEQ ID NO: 1808 - RNA, 19 nt, Artificial Sequence
  source: /note="Description of Artificial Sequence: Synthetic oligonucleotide"
uuuuuggccuugcccccgg

SEQ ID NO: 1809 - RNA, 19 nt, Artificial Sequence
  source: /note="Description of Artificial Sequence: Synthetic oligonucleotide"
cuucuuuuuggccuugccc

SEQ ID NO: 1810 - RNA, 19 nt, Artificial Sequence
  source: /note="Description of Artificial Sequence: Synthetic oligonucleotide"
uucuucuuuuuggccuugc

SEQ ID NO: 1811 - RNA, 19 nt, Artificial Sequence
  source: /note="Description of Artificial Sequence: Synthetic oligonucleotide"
ccacuucuucuuuuuggcc

SEQ ID NO: 1812 - RNA, 19 nt, Artificial Sequence
  source: /note="Description of Artificial Sequence: Synthetic oligonucleotide"
gaccacuucuucuuuuugg

SEQ ID NO: 1813 - RNA, 19 nt, Artificial Sequence
  source: /note="Description of Artificial Sequence: Synthetic oligonucleotide"
uuggaccacuucuucuuuu

SEQ ID NO: 1814 - RNA, 19 nt, Artificial Sequence
  source: /note="Description of Artificial Sequence: Synthetic oligonucleotide"
ccuuuggaccacuucuucu

SEQ ID NO: 1815 - RNA, 19 nt, Artificial Sequence
  source: /note="Description of Artificial Sequence: Synthetic oligonucleotide"
cgaacuuugccuuuggacc

SEQ ID NO: 1816 - RNA, 19 nt, Artificial Sequence
  source: /note="Description of Artificial Sequence: Synthetic oligonucleotide"
cccgaacuuugccuuugga

SEQ ID NO: 1817 - RNA, 19 nt, Artificial Sequence
  source: /note="Description of Artificial Sequence: Synthetic oligonucleotide"
uugucccgaacuuugccuu

SEQ ID NO: 1818 - RNA, 19 nt, Artificial Sequence
  source: /note="Description of Artificial Sequence: Synthetic oligonucleotide"
gagcuugucccgaacuuug

SEQ ID NO: 1819 - RNA, 19 nt, Artificial Sequence
  source: /note="Description of Artificial Sequence: Synthetic oligonucleotide"
uuauugagcuugucccgaa

SEQ ID NO: 1820 - RNA, 19 nt, Artificial Sequence
  source: /note="Description of Artificial Sequence: Synthetic oligonucleotide"
uaaguuauugagcuugucc

SEQ ID NO: 1821 - RNA, 19 nt, Artificial Sequence
  source: /note="Description of Artificial Sequence: Synthetic oligonucleotide"
caagacuaaguuauugagc

SEQ ID NO: 1822 - RNA, 19 nt, Artificial Sequence
  source: /note="Description of Artificial Sequence: Synthetic oligonucleotide"
caaacaagacuaaguuauu

SEQ ID NO: 1823 - RNA, 19 nt, Artificial Sequence
  source: /note="Description of Artificial Sequence: Synthetic oligonucleotide"
uuugucaaacaagacuaag

SEQ ID NO: 1824 - RNA, 19 nt, Artificial Sequence
  source: /note="Description of Artificial Sequence: Synthetic oligonucleotide"
gguagcuuugucaaacaag

SEQ ID NO: 1825 - RNA, 19 nt, Artificial Sequence
  source: /note="Description of Artificial Sequence: Synthetic oligonucleotide"
uuuaucauagguagcuuug

SEQ ID NO: 1826 - RNA, 19 nt, Artificial Sequence
  source: /note="Description of Artificial Sequence: Synthetic oligonucleotide"
cagaguuuaucauagguag

SEQ ID NO: 1827 - RNA, 19 nt, Artificial Sequence
  source: /note="Description of Artificial Sequence: Synthetic oligonucleotide"
uuacagaguuuaucauagg

SEQ ID NO: 1828 - RNA, 19 nt, Artificial Sequence
  source: /note="Description of Artificial Sequence: Synthetic oligonucleotide"
uuccuuacagaguuuauca

SEQ ID NO: 1829 - RNA, 19 nt, Artificial Sequence
  source: /note="Description of Artificial Sequence: Synthetic oligonucleotide"
ggaacuuccuuacagaguu

SEQ ID NO: 1830 - RNA, 19 nt, Artificial Sequence
  source: /note="Description of Artificial Sequence: Synthetic oligonucleotide"
ugggaacuuccuuacagag

SEQ ID NO: 1831 - RNA, 19 nt, Artificial Sequence
  source: /note="Description of Artificial Sequence: Synthetic oligonucleotide"
uuuauaguugggaacuucc

SEQ ID NO: 1832 - RNA, 19 nt, Artificial Sequence
  source: /note="Description of Artificial Sequence: Synthetic oligonucleotide"
uaaguuuauaguugggaac

SEQ ID NO: 1833 - RNA, 19 nt, Artificial Sequence
  source: /note="Description of Artificial Sequence: Synthetic oligonucleotide"
uauaaguuuauaguuggga

SEQ ID NO: 1834 - RNA, 19 nt, Artificial Sequence
  source: /note="Description of Artificial Sequence: Synthetic oligonucleotide"
gguuauaaguuuauaguug

SEQ ID NO: 1835 - RNA, 19 nt, Artificial Sequence
  source: /note="Description of Artificial Sequence: Synthetic oligonucleotide"
agcugggguuauaaguuua

SEQ ID NO: 1836 - RNA, 19 nt, Artificial Sequence
  source: /note="Description of Artificial Sequence: Synthetic oligonucleotide"
cagcugggguuauaaguuu

SEQ ID NO: 1837 - RNA, 19 nt, Artificial Sequence
  source: /note="Description of Artificial Sequence: Synthetic oligonucleotide"
ccacagcugggguuauaag

SEQ ID NO: 1838 - RNA, 19 nt, Artificial Sequence
  source: /note="Description of Artificial Sequence: Synthetic oligonucleotide"
cagagaccacagcuggggu

SEQ ID NO: 1839 - RNA, 19 nt, Artificial Sequence
  source: /note="Description of Artificial Sequence: Synthetic oligonucleotide"
ucucagagaccacagcugg

SEQ ID NO: 1840 - RNA, 19 nt, Artificial Sequence
  source: /note="Description of Artificial Sequence: Synthetic oligonucleotide"
uucagucucucagagacca

SEQ ID NO: 1841 - RNA, 19 nt, Artificial Sequence
  source: /note="Description of Artificial Sequence: Synthetic oligonucleotide"
gaaucuucagucucucaga

SEQ ID NO: 1842 - RNA, 19 nt, Artificial Sequence
  source: /note="Description of Artificial Sequence: Synthetic oligonucleotide"
cucgaaucuucagucucuc

SEQ ID NO: 1843 - RNA, 19 nt, Artificial Sequence
  source: /note="Description of Artificial Sequence: Synthetic oligonucleotide"
ggagccucgaaucuucagu

SEQ ID NO: 1844 - RNA, 19 nt, Artificial Sequence
  source: /note="Description of Artificial Sequence: Synthetic oligonucleotide"
ggccagggagccucgaauc

SEQ ID NO: 1845 - RNA, 19 nt, Artificial Sequence
  source: /note="Description of Artificial Sequence: Synthetic oligonucleotide"
gcccuggccagggagccuc

SEQ ID NO: 1846 - RNA, 19 nt, Artificial Sequence
  source: /note="Description of Artificial Sequence: Synthetic oligonucleotide"
ggcugcccuggccagggag

SEQ ID NO: 1847 - RNA, 19 nt, Artificial Sequence
  source: /note="Description of Artificial Sequence: Synthetic oligonucleotide"
gaagggcugcccuggccag

SEQ ID NO: 1848 - RNA, 19 nt, Artificial Sequence
  source: /note="Description of Artificial Sequence: Synthetic oligonucleotide"
cugaagggcugcccuggcc

SEQ ID NO: 1849 - RNA, 19 nt, Artificial Sequence
  source: /note="Description of Artificial Sequence: Synthetic oligonucleotide"
uaaggagcuccugaagggc

SEQ ID NO: 1850 - RNA, 19 nt, Artificial Sequence
  source: /note="Description of Artificial Sequence: Synthetic oligonucleotide"
uuuacuaaggagcuccuga

SEQ ID NO: 1851 - RNA, 19 nt, Artificial Sequence
  source: /note="Description of Artificial Sequence: Synthetic oligonucleotide"
uccuuuacuaaggagcucc

SEQ ID NO: 1852 - RNA, 19 nt, Artificial Sequence
  source: /note="Description of Artificial Sequence: Synthetic oligonucleotide"
uaaguccuuuacuaaggag

SEQ ID NO: 1853 - RNA, 19 nt, Artificial Sequence
  source: /note="Description of Artificial Sequence: Synthetic oligonucleotide"
ugauaaguccuuuacuaag

SEQ ID NO: 1854 - RNA, 19 nt, Artificial Sequence
  source: /note="Description of Artificial Sequence: Synthetic oligonucleotide"
uuugauaaguccuuuacua

SEQ ID NO: 1855 - RNA, 19 nt, Artificial Sequence
  source: /note="Description of Artificial Sequence: Synthetic oligonucleotide"
gaaaccaguuugauaaguc

SEQ ID NO: 1856 - RNA, 19 nt, Artificial Sequence
  source: /note="Description of Artificial Sequence: Synthetic oligonucleotide"
uugaaaccaguuugauaag

SEQ ID NO: 1857 - RNA, 19 nt, Artificial Sequence
  source: /note="Description of Artificial Sequence: Synthetic oligonucleotide"
gcuuugaaaccaguuugau

SEQ ID NO: 1858 - RNA, 19 nt, Artificial Sequence
  source: /note="Description of Artificial Sequence: Synthetic oligonucleotide"
ucugugcuuugaaaccagu

SEQ ID NO: 1859 - RNA, 19 nt, Artificial Sequence
  source: /note="Description of Artificial Sequence: Synthetic oligonucleotide"
ugagcucugugcuuugaaa

SEQ ID NO: 1860 - RNA, 19 nt, Artificial Sequence
  source: /note="Description of Artificial Sequence: Synthetic oligonucleotide"
uugagcucugugcuuugaa

SEQ ID NO: 1861 - RNA, 19 nt, Artificial Sequence
  source: /note="Description of Artificial Sequence: Synthetic oligonucleotide"
guaaauuacuugagcucug

SEQ ID NO: 1862 - RNA, 19 nt, Artificial Sequence
  source: /note="Description of Artificial Sequence: Synthetic oligonucleotide"
uguaaauuacuugagcucu

SEQ ID NO: 1863 - RNA, 19 nt, Artificial Sequence
  source: /note="Description of Artificial Sequence: Synthetic oligonucleotide"
cugguguaaauuacuugag

SEQ ID NO: 1864 - RNA, 19 nt, Artificial Sequence
  source: /note="Description of Artificial Sequence: Synthetic oligonucleotide"
uauuucugguguaaauuac

SEQ ID NO: 1865 - RNA, 19 nt, Artificial Sequence
  source: /note="Description of Artificial Sequence: Synthetic oligonucleotide"
guauuucugguguaaauua

SEQ ID NO: 1866 - RNA, 19 nt, Artificial Sequence
  source: /note="Description of Artificial Sequence: Synthetic oligonucleotide"
ccuugguauuucuggugua

SEQ ID NO: 1867 - RNA, 19 nt, Artificial Sequence
  source: /note="Description of Artificial Sequence: Synthetic oligonucleotide"
cacccuugguauuucuggu

SEQ ID NO: 1868 - RNA, 19 nt, Artificial Sequence
  source: /note="Description of Artificial Sequence: Synthetic oligonucleotide"
cuccacccuugguauuucu

SEQ ID NO: 1869 - RNA, 19 nt, Artificial Sequence
  source: /note="Description of Artificial Sequence: Synthetic oligonucleotide"
caucuccacccuugguauu

SEQ ID NO: 1870 - RNA, 19 nt, Artificial Sequence
  source: /note="Description of Artificial Sequence: Synthetic oligonucleotide"
cuggagcaucuccacccuu

SEQ ID NO: 1871 - RNA, 19 nt, Artificial Sequence
  source: /note="Description of Artificial Sequence: Synthetic oligonucleotide"
cagcuggagcaucuccacc

SEQ ID NO: 1872 - RNA, 19 nt, Artificial Sequence
  source: /note="Description of Artificial Sequence: Synthetic oligonucleotide"
uucaccagcagcuggagca

SEQ ID NO: 1873 - RNA, 19 nt, Artificial Sequence
  source: /note="Description of Artificial Sequence: Synthetic oligonucleotide"
cuucaccagcagcuggagc

SEQ ID NO: 1874 - RNA, 19 nt, Artificial Sequence
  source: /note="Description of Artificial Sequence: Synthetic oligonucleotide"
ucaugcaucuucaccagca

SEQ ID NO: 1875 - RNA, 19 nt, Artificial Sequence
  source: /note="Description of Artificial Sequence: Synthetic oligonucleotide"
cuauucaugcaucuucacc

SEQ ID NO: 1876 - RNA, 19 nt, Artificial Sequence
  source: /note="Description of Artificial Sequence: Synthetic oligonucleotide"
gaccuauucaugcaucuuc

SEQ ID NO: 1877 - RNA, 19 nt, Artificial Sequence
  source: /note="Description of Artificial Sequence: Synthetic oligonucleotide"
guuggaccuauucaugcau

SEQ ID NO: 1878 - RNA, 19 nt, Artificial Sequence
  source: /note="Description of Artificial Sequence: Synthetic oligonucleotide"
ugguuggaccuauucaugc

SEQ ID NO: 1879 - RNA, 19 nt, Artificial Sequence
  source: /note="Description of Artificial Sequence: Synthetic oligonucleotide"
caaauguacagcugguugg

SEQ ID NO: 1880 - RNA, 19 nt, Artificial Sequence
  source: /note="Description of Artificial Sequence: Synthetic oligonucleotide"
uuuccaaauguacagcugg

SEQ ID NO: 1881 - RNA, 19 nt, Artificial Sequence
  source: /note="Description of Artificial Sequence: Synthetic oligonucleotide"
uuuauuuuuccaaauguac

SEQ ID NO: 1882 - RNA, 19 nt, Artificial Sequence
  source: /note="Description of Artificial Sequence: Synthetic oligonucleotide"
guuuuauuuuuccaaaugu

SEQ ID NO: 1883 - RNA, 19 nt, Artificial Sequence
  source: /note="Description of Artificial Sequence: Synthetic oligonucleotide"
aauaaaguuuuauuuuucc

SEQ ID NO: 1884 - RNA, 19 nt, Artificial Sequence
  source: /note="Description of Artificial Sequence: Synthetic oligonucleotide"
uuuaauaaaguuuuauuuu

SEQ ID NO: 1885 - DNA, 19 bp, Homo sapiens
ctttttgtccgacatcttg

SEQ ID NO: 1886 - DNA, 19 bp, Homo sapiens
ttttgtccgacatcttgac

SEQ ID NO: 1887 - DNA, 19 bp, Homo sapiens
tgtccgacatcttgacgag

SEQ ID NO: 1888 - DNA, 19 bp, Homo sapiens
ccgacatcttgacgaggct

SEQ ID NO: 1889 - DNA, 19 bp, Homo sapiens
acatcttgacgaggctgcg

SEQ ID NO: 1890 - DNA, 19 bp, Homo sapiens
cttgacgaggctgcggtgt

SEQ ID NO: 1891 - DNA, 19 bp, Homo sapiens
gaggctgcggtgtctgctg

SEQ ID NO: 1892 - DNA, 19 bp, Homo sapiens
gctgcggtgtctgctgcta

SEQ ID NO: 1893 - DNA, 19 bp, Homo sapiens
cggtgtctgctgctattct

SEQ ID NO: 1894 - DNA, 19 bp, Homo sapiens
gtgtctgctgctattctcc

SEQ ID NO: 1895 - DNA, 19 bp, Homo sapiens
gtctgctgctattctccga

SEQ ID NO: 1896 - DNA, 19 bp, Homo sapiens
gctgctattctccgagctt

SEQ ID NO: 1897 - DNA, 19 bp, Homo sapiens
tattctccgagcttcgcaa

SEQ ID NO: 1898 - DNA, 19 bp, Homo sapiens
tctccgagcttcgcaatgc

SEQ ID NO: 1899 - DNA, 19 bp, Homo sapiens
ccgagcttcgcaatgccgc

SEQ ID NO: 1900 - DNA, 19 bp, Homo sapiens
cttcgcaatgccgcctaag

SEQ ID NO: 1901 - DNA, 19 bp, Homo sapiens
ttcgcaatgccgcctaagg

SEQ ID NO: 1902 - DNA, 19 bp, Homo sapiens
atgccgcctaaggacgaca

SEQ ID NO: 1903 - DNA, 19 bp, Homo sapiens
gccgcctaaggacgacaag

SEQ ID NO: 1904 - DNA, 19 bp, Homo sapiens
cgcctaaggacgacaagaa

SEQ ID NO: 1905 - DNA, 19 bp, Homo sapiens
agaagaagaaggacgctgg

SEQ ID NO: 1906 - DNA, 19 bp, Homo sapiens
gaagaaggacgctggaaag

SEQ ID NO: 1907 - DNA, 19 bp, Homo sapiens
agaaggacgctggaaagtc

SEQ ID NO: 1908 - DNA, 19 bp, Homo sapiens
acgctggaaagtcggccaa

SEQ ID NO: 1909 - DNA, 19 bp, Homo sapiens
ctggaaagtcggccaagaa

SEQ ID NO: 1910 - DNA, 19 bp, Homo sapiens
ggaaagtcggccaagaaag

SEQ ID NO: 1911 - DNA, 19 bp, Homo sapiens
gtcggccaagaaagacaaa

SEQ ID NO: 1912 - DNA, 19 bp, Homo sapiens
agaaagacaaagacccagt

SEQ ID NO: 1913 - DNA, 19 bp, Homo sapiens
acaaagacccagtgaacaa

SEQ ID NO: 1914 - DNA, 19 bp, Homo sapiens
caaagacccagtgaacaaa

SEQ ID NO: 1915 - DNA, 19 bp, Homo sapiens
gacccagtgaacaaatccg

SEQ ID NO: 1916 - DNA, 19 bp, Homo sapiens
agtgaacaaatccgggggc

SEQ ID NO: 1917 - DNA, 19 bp, Homo sapiens
tgaacaaatccgggggcaa

SEQ ID NO: 1918 - DNA, 19 bp, Homo sapiens
acaaatccgggggcaaggc

SEQ ID NO: 1919 - DNA, 19 bp, Homo sapiens
ggccaaaaagaagaagtgg

SEQ ID NO: 1920 - DNA, 19 bp, Homo sapiens
ccaaaaagaagaagtggtc

SEQ ID NO: 1921 - DNA, 19 bp, Homo sapiens
aaaagaagaagtggtccaa

SEQ ID NO: 1922 - DNA, 19 bp, Homo sapiens
agaagaagtggtccaaagg

SEQ ID NO: 1923 - DNA, 19 bp, Homo sapiens
agtggtccaaaggcaaagt

SEQ ID NO: 1924 - DNA, 19 bp, Homo sapiens
ggtccaaaggcaaagttcg

SEQ ID NO: 1925 - DNA, 19 bp, Homo sapiens
tccaaaggcaaagttcggg

SEQ ID NO: 1926 - DNA, 19 bp, Homo sapiens
aaggcaaagttcgggacaa

SEQ ID NO: 1927 - DNA, 19 bp, Homo sapiens
caaagttcgggacaagctc

SEQ ID NO: 1928 - DNA, 19 bp, Homo sapiens
ttcgggacaagctcaataa

SEQ ID NO: 1929 - DNA, 19 bp, Homo sapiens
gggacaagctcaataactt

SEQ ID NO: 1930 - DNA, 19 bp, Homo sapiens
ggacaagctcaataactta

SEQ ID NO: 1931 - DNA, 19 bp, Homo sapiens
gctcaataacttagtcttg

SEQ ID NO: 1932 - DNA, 19 bp, Homo sapiens
ctcaataacttagtcttgt

SEQ ID NO: 1933 - DNA, 19 bp, Homo sapiens
aataacttagtcttgtttg

SEQ ID NO: 1934 - DNA, 19 bp, Homo sapiens
cttagtcttgtttgacaaa

SEQ ID NO: 1935 - DNA, 19 bp, Homo sapiens
agtcttgtttgacaaagct

SEQ ID NO: 1936 - DNA, 19 bp, Homo sapiens
cttgtttgacaaagctacc

SEQ ID NO: 1937 - DNA, 19 bp, Homo sapiens
gtttgacaaagctacctat

SEQ ID NO: 1938 - DNA, 19 bp, Homo sapiens
caaagctacctatgataaa

SEQ ID NO: 1939 - DNA, 19 bp, Homo sapiens
gctacctatgataaactct

SEQ ID NO: 1940 - DNA, 19 bp, Homo sapiens
ctacctatgataaactctg

SEQ ID NO: 1941 - DNA, 19 bp, Homo sapiens
cctatgataaactctgtaa

SEQ ID NO: 1942 - DNA, 19 bp, Homo sapiens
tgataaactctgtaaggaa

SEQ ID NO: 1943 - DNA, 19 bp, Homo sapiens
aactctgtaaggaagttcc

SEQ ID NO: 1944 - DNA, 19 bp, Homo sapiens
ctctgtaaggaagttccca

SEQ ID NO: 1945 - DNA, 19 bp, Homo sapiens
taaggaagttcccaactat

SEQ ID NO: 1946 - DNA, 19 bp, Homo sapiens
ggaagttcccaactataaa

SEQ ID NO: 1947 - DNA, 19 bp, Homo sapiens
gttcccaactataaactta

SEQ ID NO: 1948 - DNA, 19 bp, Homo sapiens
tcccaactataaacttata

SEQ ID NO: 1949 - DNA, 19 bp, Homo sapiens
caactataaacttataacc

SEQ ID NO: 1950 - DNA, 19 bp, Homo sapiens
taaacttataaccccagct

SEQ ID NO: 1951 - DNA, 19 bp, Homo sapiens
aaacttataaccccagctg

SEQ ID NO: 1952 - DNA, 19 bp, Homo sapiens
cttataaccccagctgtgg

SEQ ID NO: 1953 - DNA, 19 bp, Homo sapiens
accccagctgtggtctctg

SEQ ID NO: 1954 - DNA, 19 bp, Homo sapiens
ccagctgtggtctctgaga

SEQ ID NO: 1955 - DNA, 19 bp, Homo sapiens
ctgtggtctctgagagact

SEQ ID NO: 1956 - DNA, 19 bp, Homo sapiens
tggtctctgagagactgaa

SEQ ID NO: 1957 - DNA, 19 bp, Homo sapiens
ctctgagagactgaagatt

SEQ ID NO: 1958 - DNA, 19 bp, Homo sapiens
tctgagagactgaagattc

SEQ ID NO: 1959 - DNA, 19 bp, Homo sapiens
gagagactgaagattcgag

SEQ ID NO: 1960 - DNA, 19 bp, Homo sapiens
actgaagattcgaggctcc

SEQ ID NO: 1961 - DNA, 19 bp, Homo sapiens
tgaagattcgaggctccct

SEQ ID NO: 1962 - DNA, 19 bp, Homo sapiens
gattcgaggctccctggcc

SEQ ID NO: 1963 - DNA, 19 bp, Homo sapiens
gaggctccctggccagggc

SEQ ID NO: 1964 - DNA, 19 bp, Homo sapiens
ctccctggccagggcagcc

SEQ ID NO: 1965 - DNA, 19 bp, Homo sapiens
ctggccagggcagcccttc

SEQ ID NO: 1966 - DNA, 19 bp, Homo sapiens
ggccagggcagcccttcag

SEQ ID NO: 1967 - DNA, 19 bp, Homo sapiens
gggcagcccttcaggagct

SEQ ID NO: 1968 - DNA, 19 bp, Homo sapiens
cagcccttcaggagctcct

SEQ ID NO: 1969 - DNA, 19 bp, Homo sapiens
gcccttcaggagctcctta

SEQ ID NO: 1970 - DNA, 19 bp, Homo sapiens
tcaggagctccttagtaaa

SEQ ID NO: 1971 - DNA, 19 bp, Homo sapiens
ggagctccttagtaaagga

SEQ ID NO: 1972 - DNA, 19 bp, Homo sapiens
ctccttagtaaaggactta

SEQ ID NO: 1973 - DNA, 19 bp, Homo sapiens
cttagtaaaggacttatca

SEQ ID NO: 1974 - DNA, 19 bp, Homo sapiens
tagtaaaggacttatcaaa

SEQ ID NO: 1975 - DNA, 19 bp, Homo sapiens
aaggacttatcaaactggt

SEQ ID NO: 1976 - DNA, 19 bp, Homo sapiens
gacttatcaaactggtttc

SEQ ID NO: 1977 - DNA, 19 bp, Homo sapiens
cttatcaaactggtttcaa

SEQ ID NO: 1978 - DNA, 19 bp, Homo sapiens
atcaaactggtttcaaagc

SEQ ID NO: 1979 - DNA, 19 bp, Homo sapiens
actggtttcaaagcacaga

SEQ ID NO: 1980 - DNA, 19 bp, Homo sapiens
tttcaaagcacagagctca

SEQ ID NO: 1981 - DNA, 19 bp, Homo sapiens
ttcaaagcacagagctcaa

SEQ ID NO: 1982 - DNA, 19 bp, Homo sapiens
gcacagagctcaagtaatt

SEQ ID NO: 1983 - DNA, 19 bp, Homo sapiens
cagagctcaagtaatttac

SEQ ID NO: 1984 - DNA, 19 bp, Homo sapiens
agagctcaagtaatttaca

SEQ ID NO: 1985 - DNA, 19 bp, Homo sapiens
ctcaagtaatttacaccag

SEQ ID NO: 1986 - DNA, 19 bp, Homo sapiens
gtaatttacaccagaaata

SEQ ID NO: 1987 - DNA, 19 bp, Homo sapiens
taatttacaccagaaatac

SEQ ID NO: 1988 - DNA, 19 bp, Homo sapiens
tacaccagaaataccaagg

SEQ ID NO: 1989 - DNA, 19 bp, Homo sapiens
accagaaataccaagggtg

SEQ ID NO: 1990 - DNA, 19 bp, Homo sapiens
agaaataccaagggtggag

SEQ ID NO: 1991 - DNA, 19 bp, Homo sapiens
aataccaagggtggagatg

SEQ ID NO: 1992 - DNA, 19 bp, Homo sapiens
aagggtggagatgctccag

SEQ ID NO: 1993 - DNA, 19 bp, Homo sapiens
ggtggagatgctccagctg

SEQ ID NO: 1994 - DNA, 19 bp, Homo sapiens
tggagatgctccagctgct

SEQ ID NO: 1995 - DNA, 19 bp, Homo sapiens
tgctccagctgctggtgaa

SEQ ID NO: 1996 - DNA, 19 bp, Homo sapiens
gctccagctgctggtgaag

SEQ ID NO: 1997 - DNA, 19 bp, Homo sapiens
gctgctggtgaagatgcat

SEQ ID NO: 1998 - DNA, 19 bp, Homo sapiens
tgctggtgaagatgcatga

SEQ ID NO: 1999 - DNA, 19 bp, Homo sapiens
ggtgaagatgcatgaatag

SEQ ID NO: 2000 - DNA, 19 bp, Homo sapiens
gaagatgcatgaataggtc

SEQ ID NO: 2001 - DNA, 19 bp, Homo sapiens
atgcatgaataggtccaac

SEQ ID NO: 2002 - DNA, 19 bp, Homo sapiens
gcatgaataggtccaacca

SEQ ID NO: 2003 - DNA, 19 bp, Homo sapiens
tgaataggtccaaccagct

SEQ ID NO: 2004 - DNA, 19 bp, Homo sapiens
ggtccaaccagctgtacat

SEQ ID NO: 2005 - DNA, 19 bp, Homo sapiens
ccaaccagctgtacatttg

SEQ ID NO: 2006 - DNA, 19 bp, Homo sapiens
ccagctgtacatttggaaa

SEQ ID NO: 2007 - DNA, 19 bp, Homo sapiens
gctgtacatttggaaaaat

SEQ ID NO: 2008 - DNA, 19 bp, Homo sapiens
gtacatttggaaaaataaa

SEQ ID NO: 2009 - DNA, 19 bp, Homo sapiens
acatttggaaaaataaaac

SEQ ID NO: 2010 - DNA, 19 bp, Homo sapiens
ggaaaaataaaactttatt

SEQ ID NO: 2011 - DNA, 19 bp, Homo sapiens
aaaataaaactttattaaa

SEQ ID NO: 2012 - DNA, 21 bp, Artificial Sequence
  source: /note="Description of Artificial Sequence: Synthetic oligonucleotide"
  source: /note="Description of Combined DNA/RNA Molecule: Synthetic oligonucleotide"
cuuuuuguccgacaucuugtt

SEQ ID NO: 2013 - DNA, 21 bp, Artificial Sequence
  source: /note="Description of Artificial Sequence: Synthetic oligonucleotide"
  source: /note="Description of Combined DNA/RNA Molecule: Synthetic oligonucleotide"
uuuuguccgacaucuugactt

SEQ ID NO: 2014 - DNA, 21 bp, Artificial Sequence
  source: /note="Description of Artificial Sequence: Synthetic oligonucleotide"
  source: /note="Description of Combined DNA/RNA Molecule: Synthetic oligonucleotide"
uguccgacaucuugacgagtt

SEQ ID NO: 2015 - DNA, 21 bp, Artificial Sequence
  source: /note="Description of Artificial Sequence: Synthetic oligonucleotide"
  source: /note="Description of Combined DNA/RNA Molecule: Synthetic oligonucleotide"
acaucuugacgaggcugcgtt

SEQ ID NO: 2016 - DNA, 21 bp, Artificial Sequence
  source: /note="Description of Artificial Sequence: Synthetic oligonucleotide"
  source: /note="Description of Combined DNA/RNA Molecule: Synthetic oligonucleotide"
gaggcugcggugucugcugtt

SEQ ID NO: 2017 - DNA, 21 bp, Artificial Sequence
  source: /note="Description of Artificial Sequence: Synthetic oligonucleotide"
  source: /note="Description of Combined DNA/RNA Molecule: Synthetic oligonucleotide"
gcugcggugucugcugcuatt

SEQ ID NO: 2018 - DNA, 21 bp, Artificial Sequence
  source: /note="Description of Artificial Sequence: Synthetic oligonucleotide"
  source: /note="Description of Combined DNA/RNA Molecule: Synthetic oligonucleotide"
gugucugcugcuauucucctt

SEQ ID NO: 2019 - DNA, 21 bp, Artificial Sequence
  source: /note="Description of Artificial Sequence: Synthetic oligonucleotide"
  source: /note="Description of Combined DNA/RNA Molecule: Synthetic oligonucleotide"
gucugcugcuauucuccgatt

SEQ ID NO: 2020 - DNA, 21 bp, Artificial Sequence
  source: /note="Description of Artificial Sequence: Synthetic oligonucleotide"
  source: /note="Description of Combined DNA/RNA Molecule: Synthetic oligonucleotide"
uauucuccgagcuucgcaatt

SEQ ID NO: 2021 - DNA, 21 bp, Artificial Sequence
  source: /note="Description of Artificial Sequence: Synthetic oligonucleotide"
  source: /note="Description of Combined DNA/RNA Molecule: Synthetic oligonucleotide"
ucuccgagcuucgcaaugctt

SEQ ID NO: 2022 - DNA, 21 bp, Artificial Sequence
  source: /note="Description of Artificial Sequence: Synthetic oligonucleotide"
  source: /note="Description of Combined DNA/RNA Molecule: Synthetic oligonucleotide"
ccgagcuucgcaaugccgctt

SEQ ID NO: 2023 - DNA, 21 bp, Artificial Sequence
  source: /note="Description of Artificial Sequence: Synthetic oligonucleotide"
  source: /note="Description of Combined DNA/RNA Molecule: Synthetic oligonucleotide"
cuucgcaaugccgccuaagtt

SEQ ID NO: 2024 - DNA, 21 bp, Artificial Sequence
  source: /note="Description of Artificial Sequence: Synthetic oligonucleotide"
  source: /note="Description of Combined DNA/RNA Molecule: Synthetic oligonucleotide"
uucgcaaugccgccuaaggtt

SEQ ID NO: 2025 - DNA, 21 bp, Artificial Sequence
  source: /note="Description of Artificial Sequence: Synthetic oligonucleotide"
  source: /note="Description of Combined DNA/RNA Molecule: Synthetic oligonucleotide"
augccgccuaaggacgacatt

SEQ ID NO: 2026 - DNA, 21 bp, Artificial Sequence
  source: /note="Description of Artificial Sequence: Synthetic oligonucleotide"
  source: /note="Description of Combined DNA/RNA Molecule: Synthetic oligonucleotide"
gccgccuaaggacgacaagtt

SEQ ID NO: 2027 - DNA, 21 bp, Artificial Sequence
  source: /note="Description of Artificial Sequence: Synthetic oligonucleotide"
  source: /note="Description of Combined DNA/RNA Molecule: Synthetic oligonucleotide"
cgccuaaggacgacaagaatt

SEQ ID NO: 2028 - DNA, 21 bp, Artificial Sequence
  source: /note="Description of Artificial Sequence: Synthetic oligonucleotide"
aggacgacaagaagaagaatt

SEQ ID NO: 2029 - DNA, 21 bp, Artificial Sequence
  source: /note="Description of Artificial Sequence: Synthetic oligonucleotide"
ggacgacaagaagaagaagtt

SEQ ID NO: 2030 - DNA, 21 bp, Artificial Sequence
  source: /note="Description of Artificial Sequence: Synthetic oligonucleotide"
acaagaagaagaaggacgctt

SEQ ID NO: 2031 - DNA, 21 bp, Artificial Sequence
  source: /note="Description of Artificial Sequence: Synthetic oligonucleotide"
  source: /note="Description of Combined DNA/RNA Molecule: Synthetic oligonucleotide"
agaagaagaaggacgcuggtt

SEQ ID NO: 2032 - DNA, 21 bp, Artificial Sequence
  source: /note="Description of Artificial Sequence: Synthetic oligonucleotide"
  source: /note="Description of Combined DNA/RNA Molecule: Synthetic oligonucleotide"
gaagaaggacgcuggaaagtt

SEQ ID NO: 2033 - DNA, 21 bp, Artificial Sequence
  source: /note="Description of Artificial Sequence: Synthetic oligonucleotide"
  source: /note="Description of Combined DNA/RNA Molecule: Synthetic oligonucleotide"
agaaggacgcuggaaaguctt

SEQ ID NO: 2034 - DNA, 21 bp, Artificial Sequence
  source: /note="Description of Artificial Sequence: Synthetic oligonucleotide"
  source: /note="Description of Combined DNA/RNA Molecule: Synthetic oligonucleotide"
acgcuggaaagucggccaatt

SEQ ID NO: 2035 - DNA, 21 bp, Artificial Sequence
  source: /note="Description of Artificial Sequence: Synthetic oligonucleotide"
  source: /note="Description of Combined DNA/RNA Molecule: Synthetic oligonucleotide"
cuggaaagucggccaagaatt

SEQ ID NO: 2036 - DNA, 21 bp, Artificial Sequence
  source: /note="Description of Artificial Sequence: Synthetic oligonucleotide"
  source: /note="Description of Combined DNA/RNA Molecule: Synthetic oligonucleotide"
ggaaagucggccaagaaagtt

SEQ ID NO: 2037 - DNA, 21 bp, Artificial Sequence
  source: /note="Description of Artificial Sequence: Synthetic oligonucleotide"
  source: /note="Description of Combined DNA/RNA Molecule: Synthetic oligonucleotide"
gucggccaagaaagacaaatt

SEQ ID NO: 2038 - DNA, 21 bp, Artificial Sequence
  source: /note="Description of Artificial Sequence: Synthetic oligonucleotide"
cggccaagaaagacaaagatt

SEQ ID NO: 2039 - DNA, 21 bp, Artificial Sequence
  source: /note="Description of Artificial Sequence: Synthetic oligonucleotide"
caagaaagacaaagacccatt

SEQ ID NO: 2040 - DNA, 21 bp, Artificial Sequence
  source: /note="Description of Artificial Sequence: Synthetic oligonucleotide"
  source: /note="Description of Combined DNA/RNA Molecule: Synthetic oligonucleotide"
acaaagacccagugaacaatt

SEQ ID NO: 2041 - DNA, 21 bp, Artificial Sequence
  source: /note="Description of Artificial Sequence: Synthetic oligonucleotide"
  source: /note="Description of Combined DNA/RNA Molecule: Synthetic oligonucleotide"
caaagacccagugaacaaatt

SEQ ID NO: 2042 - DNA, 21 bp, Artificial Sequence
  source: /note="Description of Artificial Sequence: Synthetic oligonucleotide"
  source: /note="Description of Combined DNA/RNA Molecule: Synthetic oligonucleotide"
gacccagugaacaaauccgtt

SEQ ID NO: 2043 - DNA, 21 bp, Artificial Sequence
  source: /note="Description of Artificial Sequence: Synthetic oligonucleotide"
  source: /note="Description of Combined DNA/RNA Molecule: Synthetic oligonucleotide"
agugaacaaauccgggggctt

SEQ ID NO: 2044 - DNA, 21 bp, Artificial Sequence
  source: /note="Description of Artificial Sequence: Synthetic oligonucleotide"
  source: /note="Description of Combined DNA/RNA Molecule: Synthetic oligonucleotide"
ugaacaaauccgggggcaatt

SEQ ID NO: 2045 - DNA, 21 bp, Artificial Sequence
  source: /note="Description of Artificial Sequence: Synthetic oligonucleotide"
  source: /note="Description of Combined DNA/RNA Molecule: Synthetic oligonucleotide"
acaaauccgggggcaaggctt

SEQ ID NO: 2046 - DNA, 21 bp, Artificial Sequence
  source: /note="Description of Artificial Sequence: Synthetic oligonucleotide"
ccgggggcaaggccaaaaatt

SEQ ID NO: 2047 - DNA, 21 bp, Artificial Sequence
  source: /note="Description of Artificial Sequence: Synthetic oligonucleotide"
gggcaaggccaaaaagaagtt

SEQ ID NO: 2048 - DNA, 21 bp, Artificial Sequence
  source: /note="Description of Artificial Sequence: Synthetic oligonucleotide"
gcaaggccaaaaagaagaatt

SEQ ID NO: 2049 - DNA, 21 bp, Artificial Sequence
  source: /note="Description of Artificial Sequence: Synthetic oligonucleotide"
  source: /note="Description of Combined DNA/RNA Molecule: Synthetic oligonucleotide"
ggccaaaaagaagaaguggtt

SEQ ID NO: 2050 - DNA, 21 bp, Artificial Sequence
  source: /note="Description of Artificial Sequence: Synthetic oligonucleotide"
  source: /note="Description of Combined DNA/RNA Molecule: Synthetic oligonucleotide"
ccaaaaagaagaagugguctt

SEQ ID NO: 2051 - DNA, 21 bp, Artificial Sequence
  source: /note="Description of Artificial Sequence: Synthetic oligonucleotide"
  source: /note="Description of Combined DNA/RNA Molecule: Synthetic oligonucleotide"
aaaagaagaagugguccaatt

SEQ ID NO: 2052 - DNA, 21 bp, Artificial Sequence
  source: /note="Description of Artificial Sequence: Synthetic oligonucleotide"
  source: /note="Description of Combined DNA/RNA Molecule: Synthetic oligonucleotide"
agaagaagugguccaaaggtt

SEQ ID NO: 2053 - DNA, 21 bp, Artificial Sequence
  source: /note="Description of Artificial Sequence: Synthetic oligonucleotide"
  source: /note="Description of Combined DNA/RNA Molecule: Synthetic oligonucleotide"
gguccaaaggcaaaguucgtt

SEQ ID NO: 2054 - DNA, 21 bp, Artificial Sequence
  source: /note="Description of Artificial Sequence: Synthetic oligonucleotide"
  source: /note="Description of Combined DNA/RNA Molecule: Synthetic oligonucleotide"
uccaaaggcaaaguucgggtt

SEQ ID NO: 2055 - DNA, 21 bp, Artificial Sequence
  source: /note="Description of Artificial Sequence: Synthetic oligonucleotide"
  source: /note="Description of Combined DNA/RNA Molecule: Synthetic oligonucleotide"
aaggcaaaguucgggacaatt

SEQ ID NO: 2056 - DNA, 21 bp, Artificial Sequence
  source: /note="Description of Artificial Sequence: Synthetic oligonucleotide"
  source: /note="Description of Combined DNA/RNA Molecule: Synthetic oligonucleotide"
caaaguucgggacaagcuctt

SEQ ID NO: 2057 - DNA, 21 bp, Artificial Sequence
  source: /note="Description of Artificial Sequence: Synthetic oligonucleotide"
  source: /note="Description of Combined DNA/RNA Molecule: Synthetic oligonucleotide"
uucgggacaagcucaauaatt

SEQ ID NO: 2058 - DNA, 21 bp, Artificial Sequence
  source: /note="Description of Artificial Sequence: Synthetic oligonucleotide"
  source: /note="Description of Combined DNA/RNA Molecule: Synthetic oligonucleotide"
ggacaagcucaauaacuuatt

SEQ ID NO: 2059 - DNA, 21 bp, Artificial Sequence
  source: /note="Description of Artificial Sequence: Synthetic oligonucleotide"
  source: /note="Description of Combined DNA/RNA Molecule: Synthetic oligonucleotide"
gcucaauaacuuagucuugtt

SEQ ID NO: 2060 - DNA, 21 bp, Artificial Sequence
  source: /note="Description of Artificial Sequence: Synthetic oligonucleotide"
  source: /note="Description of Combined DNA/RNA Molecule: Synthetic oligonucleotide"
aauaacuuagucuuguuugtt

SEQ ID NO: 2061 - DNA, 21 bp, Artificial Sequence
  source: /note="Description of Artificial Sequence: Synthetic oligonucleotide"
  source: /note="Description of Combined DNA/RNA Molecule: Synthetic oligonucleotide"
cuuagucuuguuugacaaatt

SEQ ID NO: 2062 - DNA, 21 bp, Artificial Sequence
  source: /note="Description of Artificial Sequence: Synthetic oligonucleotide"
  source: /note="Description of Combined DNA/RNA Molecule: Synthetic oligonucleotide"
cuuguuugacaaagcuacctt

SEQ ID NO: 2063 - DNA, 21 bp, Artificial Sequence
  source: /note="Description of Artificial Sequence: Synthetic oligonucleotide"
  source: /note="Description of Combined DNA/RNA Molecule: Synthetic oligonucleotide"
caaagcuaccuaugauaaatt

SEQ ID NO: 2064 - DNA, 21 bp, Artificial Sequence
  source: /note="Description of Artificial Sequence: Synthetic oligonucleotide"
  source: /note="Description of Combined DNA/RNA Molecule: Synthetic oligonucleotide"
cuaccuaugauaaacucugtt

SEQ ID NO: 2065 - DNA, 21 bp, Artificial Sequence
  source: /note="Description of Artificial Sequence: Synthetic oligonucleotide"
  source: /note="Description of Combined DNA/RNA Molecule: Synthetic oligonucleotide"
ccuaugauaaacucuguaatt

SEQ ID NO: 2066 - DNA, 21 bp, Artificial Sequence
  source: /note="Description of Artificial Sequence: Synthetic oligonucleotide"
  source: /note="Description of Combined DNA/RNA Molecule: Synthetic oligonucleotide"
ugauaaacucuguaaggaatt

SEQ ID NO: 2067 - DNA, 21 bp, Artificial Sequence
  source: /note="Description of Artificial Sequence: Synthetic oligonucleotide"
  source: /note="Description of Combined DNA/RNA Molecule: Synthetic oligonucleotide"
aacucuguaaggaaguucctt

SEQ ID NO: 2068 - DNA, 21 bp, Artificial Sequence
  source: /note="Description of Artificial Sequence: Synthetic oligonucleotide"
  source: /note="Description of Combined DNA/RNA Molecule: Synthetic oligonucleotide"
cucuguaaggaaguucccatt

SEQ ID NO: 2069 - DNA, 21 bp, Artificial Sequence
  source: /note="Description of Artificial Sequence: Synthetic oligonucleotide"
  source: /note="Description of Combined DNA/RNA Molecule: Synthetic oligonucleotide"
ggaaguucccaacuauaaatt

SEQ ID NO: 2070 - DNA, 21 bp, Artificial Sequence
  source: /note="Description of Artificial Sequence: Synthetic oligonucleotide"
  source: /note="Description of Combined DNA/RNA Molecule: Synthetic oligonucleotide"
guucccaacuauaaacuuatt

SEQ ID NO: 2071 - DNA, 21 bp, Artificial Sequence
  source: /note="Description of Artificial Sequence: Synthetic oligonucleotide"
  source: /note="Description of Combined DNA/RNA Molecule: Synthetic oligonucleotide"
ucccaacuauaaacuuauatt

SEQ ID NO: 2072 - DNA, 21 bp, Artificial Sequence
  source: /note="Description of Artificial Sequence: Synthetic oligonucleotide"
  source: /note="Description of Combined DNA/RNA Molecule: Synthetic oligonucleotide"
caacuauaaacuuauaacctt

SEQ ID NO: 2073 - DNA, 21 bp, Artificial Sequence
  source: /note="Description of Artificial Sequence: Synthetic oligonucleotide"
  source: /note="Description of Combined DNA/RNA Molecule: Synthetic oligonucleotide"
uaaacuuauaaccccagcutt

SEQ ID NO: 2074 - DNA, 21 bp, Artificial Sequence
  source: /note="Description of Artificial Sequence: Synthetic oligonucleotide"
  source: /note="Description of Combined DNA/RNA Molecule: Synthetic oligonucleotide"
aaacuuauaaccccagcugtt

SEQ ID NO: 2075 - DNA, 21 bp, Artificial Sequence
  source: /note="Description of Artificial Sequence: Synthetic oligonucleotide"
  source: /note="Description of Combined DNA/RNA Molecule: Synthetic oligonucleotide"
cuuauaaccccagcuguggtt

SEQ ID NO: 2076 - DNA, 21 bp, Artificial Sequence
  source: /note="Description of Artificial Sequence: Synthetic oligonucleotide"
  source: /note="Description of Combined DNA/RNA Molecule: Synthetic oligonucleotide"
accccagcuguggucucugtt

SEQ ID NO: 2077 - DNA, 21 bp, Artificial Sequence
  source: /note="Description of Artificial Sequence: Synthetic oligonucleotide"
  source: /note="Description of Combined DNA/RNA Molecule: Synthetic oligonucleotide"
ccagcuguggucucugagatt

SEQ ID NO: 2078 - DNA, 21 bp, Artificial Sequence
  source: /note="Description of Artificial Sequence: Synthetic oligonucleotide"
  source: /note="Description of Combined DNA/RNA Molecule: Synthetic oligonucleotide"
uggucucugagagacugaatt

SEQ ID NO: 2079 - DNA, 21 bp, Artificial Sequence
  source: /note="Description of Artificial Sequence: Synthetic oligonucleotide"
  source: /note="Description of Combined DNA/RNA Molecule: Synthetic oligonucleotide"
ucugagagacugaagauuctt

SEQ ID NO: 2080 - DNA, 21 bp, Artificial Sequence
  source: /note="Description of Artificial Sequence: Synthetic oligonucleotide"
  source: /note="Description of Combined DNA/RNA Molecule: Synthetic oligonucleotide"
gagagacugaagauucgagtt

SEQ ID NO: 2081 - DNA, 21 bp, Artificial Sequence
  source: /note="Description of Artificial Sequence: Synthetic oligonucleotide"
  source: /note="Description of Combined DNA/RNA Molecule: Synthetic oligonucleotide"
acugaagauucgaggcucctt

SEQ ID NO: 2082 - DNA, 21 bp, Artificial Sequence
  source: /note="Description of Artificial Sequence: Synthetic oligonucleotide"
  source: /note="Description of Combined DNA/RNA Molecule: Synthetic oligonucleotide"
gauucgaggcucccuggcctt

SEQ ID NO: 2083 - DNA, 21 bp, Artificial Sequence
  source: /note="Description of Artificial Sequence: Synthetic oligonucleotide"
  source: /note="Description of Combined DNA/RNA Molecule: Synthetic oligonucleotide"
gaggcucccuggccagggctt

SEQ ID NO: 2084 - DNA, 21 bp, Artificial Sequence
  source: /note="Description of Artificial Sequence: Synthetic oligonucleotide"
  source: /note="Description of Combined DNA/RNA Molecule: Synthetic oligonucleotide"
cucccuggccagggcagcctt

SEQ ID NO: 2085 - DNA, 21 bp, Artificial Sequence
  source: /note="Description of Artificial Sequence: Synthetic oligonucleotide"
  source: /note="Description of Combined DNA/RNA Molecule: Synthetic oligonucleotide"
cuggccagggcagcccuuctt

SEQ ID NO: 2086 - DNA, 21 bp, Artificial Sequence
  source: /note="Description of Artificial Sequence: Synthetic oligonucleotide"
  source: /note="Description of Combined DNA/RNA Molecule: Synthetic oligonucleotide"
ggccagggcagcccuucagtt

SEQ ID NO: 2087 - DNA, 21 bp, Artificial Sequence
  source: /note="Description of Artificial Sequence: Synthetic oligonucleotide"
  source: /note="Description of Combined DNA/RNA Molecule: Synthetic oligonucleotide"
gcccuucaggagcuccuuatt

SEQ ID NO: 2088 - DNA, 21 bp, Artificial Sequence
  source: /note="Description of Artificial Sequence: Synthetic oligonucleotide"
  source: /note="Description of Combined DNA/RNA Molecule: Synthetic oligonucleotide"
ucaggagcuccuuaguaaatt

SEQ ID NO: 2089 - DNA, 21 bp, Artificial Sequence
  source: /note="Description of Artificial Sequence: Synthetic oligonucleotide"
  source: /note="Description of Combined DNA/RNA Molecule: Synthetic oligonucleotide"
ggagcuccuuaguaaaggatt

SEQ ID NO: 2090 - DNA, 21 bp, Artificial Sequence
  source: /note="Description of Artificial Sequence: Synthetic oligonucleotide"
  source: /note="Description of Combined DNA/RNA Molecule: Synthetic oligonucleotide"
cuccuuaguaaaggacuuatt

SEQ ID NO: 2091 - DNA, 21 bp, Artificial Sequence
  source: /note="Description of Artificial Sequence: Synthetic oligonucleotide"
  source: /note="Description of Combined DNA/RNA Molecule: Synthetic oligonucleotide"
cuuaguaaaggacuuaucatt

SEQ ID NO: 2092 - DNA, 21 bp, Artificial Sequence
  source: /note="Description of Artificial Sequence: Synthetic oligonucleotide"
  source: /note="Description of Combined DNA/RNA Molecule: Synthetic oligonucleotide"
uaguaaaggacuuaucaaatt

SEQ ID NO: 2093 - DNA, 21 bp, Artificial Sequence
  source: /note="Description of Artificial Sequence: Synthetic oligonucleotide"
  source: /note="Description of Combined DNA/RNA Molecule: Synthetic oligonucleotide"
gacuuaucaaacugguuuctt

SEQ ID NO: 2094 - DNA, 21 bp, Artificial Sequence
  source: /note="Description of Artificial Sequence: Synthetic oligonucleotide"
  source: /note="Description of Combined DNA/RNA Molecule: Synthetic oligonucleotide"
cuuaucaaacugguuucaatt

SEQ ID NO: 2095 - DNA, 21 bp, Artificial Sequence
  source: /note="Description of Artificial Sequence: Synthetic oligonucleotide"
  source: /note="Description of Combined DNA/RNA Molecule: Synthetic oligonucleotide"
aucaaacugguuucaaagctt

SEQ ID NO: 2096 - DNA, 21 bp, Artificial Sequence
  source: /note="Description of Artificial Sequence: Synthetic oligonucleotide"
  source: /note="Description of Combined DNA/RNA Molecule: Synthetic oligonucleotide"
acugguuucaaagcacagatt

SEQ ID NO: 2097 - DNA, 21 bp, Artificial Sequence
  source: /note="Description of Artificial Sequence: Synthetic oligonucleotide"
  source: /note="Description of Combined DNA/RNA Molecule: Synthetic oligonucleotide"
uuucaaagcacagagcucatt

SEQ ID NO: 2098 - DNA, 21 bp, Artificial Sequence
  source: /note="Description of Artificial Sequence: Synthetic oligonucleotide"
  source: /note="Description of Combined DNA/RNA Molecule: Synthetic oligonucleotide"
uucaaagcacagagcucaatt

SEQ ID NO: 2099 - DNA, 21 bp, Artificial Sequence
  source: /note="Description of Artificial Sequence: Synthetic oligonucleotide"
  source: /note="Description of Combined DNA/RNA Molecule: Synthetic oligonucleotide"
cagagcucaaguaauuuactt

SEQ ID NO: 2100 - DNA, 21 bp, Artificial Sequence
  source: /note="Description of Artificial Sequence: Synthetic oligonucleotide"
  source: /note="Description of Combined DNA/RNA Molecule: Synthetic oligonucleotide"
agagcucaaguaauuuacatt

SEQ ID NO: 2101 - DNA, 21 bp, Artificial Sequence
  source: /note="Description of Artificial Sequence: Synthetic oligonucleotide"
  source: /note="Description of Combined DNA/RNA Molecule: Synthetic oligonucleotide"
cucaaguaauuuacaccagtt

SEQ ID NO: 2102 - DNA, 21 bp, Artificial Sequence
  source: /note="Description of Artificial Sequence: Synthetic oligonucleotide"
  source: /note="Description of Combined DNA/RNA Molecule: Synthetic oligonucleotide"
guaauuuacaccagaaauatt

SEQ ID NO: 2103 - DNA, 21 bp, Artificial Sequence
  source: /note="Description of Artificial Sequence: Synthetic oligonucleotide"
  source: /note="Description of Combined DNA/RNA Molecule: Synthetic oligonucleotide"
uaauuuacaccagaaauactt

SEQ ID NO: 2104 - DNA, 21 bp, Artificial Sequence
  source: /note="Description of Artificial Sequence: Synthetic oligonucleotide"
  source: /note="Description of Combined DNA/RNA Molecule: Synthetic oligonucleotide"
uacaccagaaauaccaaggtt

SEQ ID NO: 2105 - DNA, 21 bp, Artificial Sequence
  source: /note="Description of Artificial Sequence: Synthetic oligonucleotide"
  source: /note="Description of Combined DNA/RNA Molecule: Synthetic oligonucleotide"
accagaaauaccaagggugtt

SEQ ID NO: 2106 - DNA, 21 bp, Artificial Sequence
  source: /note="Description of Artificial Sequence: Synthetic oligonucleotide"
  source: /note="Description of Combined DNA/RNA Molecule: Synthetic oligonucleotide"
agaaauaccaaggguggagtt

SEQ ID NO: 2107 - DNA, 21 bp, Artificial Sequence
  source: /note="Description of Artificial Sequence: Synthetic oligonucleotide"
  source: /note="Description of Combined DNA/RNA Molecule: Synthetic oligonucleotide"
aauaccaaggguggagaugtt

SEQ ID NO: 2108 - DNA, 21 bp, Artificial Sequence
  source: /note="Description of Artificial Sequence: Synthetic oligonucleotide"
  source: /note="Description of Combined DNA/RNA Molecule: Synthetic oligonucleotide"
aaggguggagaugcuccagtt

SEQ ID NO: 2109 - DNA, 21 bp, Artificial Sequence
  source: /note="Description of Artificial Sequence: Synthetic oligonucleotide"
  source: /note="Description of Combined DNA/RNA Molecule: Synthetic oligonucleotide"
gguggagaugcuccagcugtt

SEQ ID NO: 2110 - DNA, 21 bp, Artificial Sequence
  source: /note="Description of Artificial Sequence: Synthetic oligonucleotide"
  source: /note="Description of Combined DNA/RNA Molecule: Synthetic oligonucleotide"
ugcuccagcugcuggugaatt

SEQ ID NO: 2111 - DNA, 21 bp, Artificial Sequence
  source: /note="Description of Artificial Sequence: Synthetic oligonucleotide"
  source: /note="Description of Combined DNA/RNA Molecule: Synthetic oligonucleotide"
gcuccagcugcuggugaagtt

SEQ ID NO: 2112 - DNA, 21 bp, Artificial Sequence
  source: /note="Description of Artificial Sequence: Synthetic oligonucleotide"
  source: /note="Description of Combined DNA/RNA Molecule: Synthetic oligonucleotide"
ugcuggugaagaugcaugatt

SEQ ID NO: 2113 - DNA, 21 bp, Artificial Sequence
  source: /note="Description of Artificial Sequence: Synthetic oligonucleotide"
  source: /note="Description of Combined DNA/RNA Molecule: Synthetic oligonucleotide"
ggugaagaugcaugaauagtt

SEQ ID NO: 2114 - DNA, 21 bp, Artificial Sequence
  source: /note="Description of Artificial Sequence: Synthetic oligonucleotide"
  source: /note="Description of Combined DNA/RNA Molecule: Synthetic oligonucleotide"
gaagaugcaugaauagguctt

SEQ ID NO: 2115 - DNA, 21 bp, Artificial Sequence
  source: /note="Description of Artificial Sequence: Synthetic oligonucleotide"
  source: /note="Description of Combined DNA/RNA Molecule: Synthetic oligonucleotide"
augcaugaauagguccaactt

SEQ ID NO: 2116 - DNA, 21 bp, Artificial Sequence
  source: /note="Description of Artificial Sequence: Synthetic oligonucleotide"
  source: /note="Description of Combined DNA/RNA Molecule: Synthetic oligonucleotide"
gcaugaauagguccaaccatt

SEQ ID NO: 2117 - DNA, 21 bp, Artificial Sequence
  source: /note="Description of Artificial Sequence: Synthetic oligonucleotide"
  source: /note="Description of Combined DNA/RNA Molecule: Synthetic oligonucleotide"
ccaaccagcuguacauuugtt

SEQ ID NO: 2118 - DNA, 21 bp, Artificial Sequence
  source: /note="Description of Artificial Sequence: Synthetic oligonucleotide"
  source: /note="Description of Combined DNA/RNA Molecule: Synthetic oligonucleotide"
ccagcuguacauuuggaaatt

SEQ ID NO: 2119 - DNA, 21 bp, Artificial Sequence
  source: /note="Description of Artificial Sequence: Synthetic oligonucleotide"
  source: /note="Description of Combined DNA/RNA Molecule: Synthetic oligonucleotide"
guacauuuggaaaaauaaatt

SEQ ID NO: 2120 - DNA, 21 bp, Artificial Sequence
  source: /note="Description of Artificial Sequence: Synthetic oligonucleotide"
  source: /note="Description of Combined DNA/RNA Molecule: Synthetic oligonucleotide"
acauuuggaaaaauaaaactt

SEQ ID NO: 2121 - DNA, 21 bp, Artificial Sequence
  source: /note="Description of Artificial Sequence: Synthetic oligonucleotide"
  source: /note="Description of Combined DNA/RNA Molecule: Synthetic oligonucleotide"
ggaaaaauaaaacuuuauutt

SEQ ID NO: 2122 - DNA, 21 bp, Artificial Sequence
  source: /note="Description of Artificial Sequence: Synthetic oligonucleotide"
  source: /note="Description of Combined DNA/RNA Molecule: Synthetic oligonucleotide"
aaaauaaaacuuuauuaaatt

SEQ ID NO: 2123 - DNA, 21 bp, Artificial Sequence
  source: /note="Description of Artificial Sequence: Synthetic oligonucleotide"
  source: /note="Description of Combined DNA/RNA Molecule: Synthetic oligonucleotide"
caagaugucggacaaaaagtt

SEQ ID NO: 2124 - DNA, 21 bp, Artificial Sequence
  source: /note="Description of Artificial Sequence: Synthetic oligonucleotide"
  source: /note="Description of Combined DNA/RNA Molecule: Synthetic oligonucleotide"
gucaagaugucggacaaaatt

SEQ ID NO: 2125 - DNA, 21 bp, Artificial Sequence
  source: /note="Description of Artificial Sequence: Synthetic oligonucleotide"
  source: /note="Description of Combined DNA/RNA Molecule: Synthetic oligonucleotide"
cucgucaagaugucggacatt

SEQ ID NO: 2126 - DNA, 21 bp, Artificial Sequence
  source: /note="Description of Artificial Sequence: Synthetic oligonucleotide"
  source: /note="Description of Combined DNA/RNA Molecule: Synthetic oligonucleotide"
cgcagccucgucaagaugutt

SEQ ID NO: 2127 - DNA, 21 bp, Artificial Sequence
  source: /note="Description of Artificial Sequence: Synthetic oligonucleotide"
  source: /note="Description of Combined DNA/RNA Molecule: Synthetic oligonucleotide"
cagcagacaccgcagccuctt

SEQ ID NO: 2128 - DNA, 21 bp, Artificial Sequence
  source: /note="Description of Artificial Sequence: Synthetic oligonucleotide"
  source: /note="Description of Combined DNA/RNA Molecule: Synthetic oligonucleotide"
uagcagcagacaccgcagctt

SEQ ID NO: 2129 - DNA, 21 bp, Artificial Sequence
  source: /note="Description of Artificial Sequence: Synthetic oligonucleotide"
  source: /note="Description of Combined DNA/RNA Molecule: Synthetic oligonucleotide"
ggagaauagcagcagacactt

SEQ ID NO: 2130 - DNA, 21 bp, Artificial Sequence
  source: /note="Description of Artificial Sequence: Synthetic oligonucleotide"
  source: /note="Description of Combined DNA/RNA Molecule: Synthetic oligonucleotide"
ucggagaauagcagcagactt

SEQ ID NO: 2131 - DNA, 21 bp, Artificial Sequence
  source: /note="Description of Artificial Sequence: Synthetic oligonucleotide"
  source: /note="Description of Combined DNA/RNA Molecule: Synthetic oligonucleotide"
uugcgaagcucggagaauatt

SEQ ID NO: 2132 - DNA, 21 bp, Artificial Sequence
  source: /note="Description of Artificial Sequence: Synthetic oligonucleotide"
  source: /note="Description of Combined DNA/RNA Molecule: Synthetic oligonucleotide"
gcauugcgaagcucggagatt

SEQ ID NO: 2133 - DNA, 21 bp, Artificial Sequence
  source: /note="Description of Artificial Sequence: Synthetic oligonucleotide"
  source: /note="Description of Combined DNA/RNA Molecule: Synthetic oligonucleotide"
gcggcauugcgaagcucggtt

SEQ ID NO: 2134 - DNA, 21 bp, Artificial Sequence
  source: /note="Description of Artificial Sequence: Synthetic oligonucleotide"
  source: /note="Description of Combined DNA/RNA Molecule: Synthetic oligonucleotide"
cuuaggcggcauugcgaagtt

SEQ ID NO: 2135 - DNA, 21 bp, Artificial Sequence
  source: /note="Description of Artificial Sequence: Synthetic oligonucleotide"
  source: /note="Description of Combined DNA/RNA Molecule: Synthetic oligonucleotide"
ccuuaggcggcauugcgaatt

SEQ ID NO: 2136 - DNA, 21 bp, Artificial Sequence
  source: /note="Description of Artificial Sequence: Synthetic oligonucleotide"
  source: /note="Description of Combined DNA/RNA Molecule: Synthetic oligonucleotide"
ugucguccuuaggcggcautt

SEQ ID NO: 2137 - DNA, 21 bp, Artificial Sequence
  source: /note="Description of Artificial Sequence: Synthetic oligonucleotide"
  source: /note="Description of Combined DNA/RNA Molecule: Synthetic oligonucleotide"
cuugucguccuuaggcggctt

SEQ ID NO: 2138 - DNA, 21 bp, Artificial Sequence
  source: /note="Description of Artificial Sequence: Synthetic oligonucleotide"
  source: /note="Description of Combined DNA/RNA Molecule: Synthetic oligonucleotide"
uucuugucguccuuaggcgtt

SEQ ID NO: 2139 - DNA, 21 bp, Artificial Sequence
  source: /note="Description of Artificial Sequence: Synthetic oligonucleotide"
  source: /note="Description of Combined DNA/RNA Molecule: Synthetic oligonucleotide"
uucuucuucuugucguccutt

SEQ ID NO: 2140 - DNA, 21 bp, Artificial Sequence
  source: /note="Description of Artificial Sequence: Synthetic oligonucleotide"
  source: /note="Description of Combined DNA/RNA Molecule: Synthetic oligonucleotide"
cuucuucuucuugucgucctt

SEQ ID NO: 2141 - DNA, 21 bp, Artificial Sequence
  source: /note="Description of Artificial Sequence: Synthetic oligonucleotide"
  source: /note="Description of Combined DNA/RNA Molecule: Synthetic oligonucleotide"
gcguccuucuucuucuugutt

SEQ ID NO: 2142 - DNA, 21 bp, Artificial Sequence
  source: /note="Description of Artificial Sequence: Synthetic oligonucleotide"
  source: /note="Description of Combined DNA/RNA Molecule: Synthetic oligonucleotide"
ccagcguccuucuucuucutt

SEQ ID NO: 2143 - DNA, 21 bp, Artificial Sequence
  source: /note="Description of Artificial Sequence: Synthetic oligonucleotide"
  source: /note="Description of Combined DNA/RNA Molecule: Synthetic oligonucleotide"
cuuuccagcguccuucuuctt

SEQ ID NO: 2144 - DNA, 21 bp, Artificial Sequence
  source: /note="Description of Artificial Sequence: Synthetic oligonucleotide"
  source: /note="Description of Combined DNA/RNA Molecule: Synthetic oligonucleotide"
gacuuuccagcguccuucutt

SEQ ID NO: 2145 - DNA, 21 bp, Artificial Sequence
  source: /note="Description of Artificial Sequence: Synthetic oligonucleotide"
  source: /note="Description of Combined DNA/RNA Molecule: Synthetic oligonucleotide"
uuggccgacuuuccagcgutt

SEQ ID NO: 2146 - DNA, 21 bp, Artificial Sequence
  source: /note="Description of Artificial Sequence: Synthetic oligonucleotide"
  source: /note="Description of Combined DNA/RNA Molecule: Synthetic oligonucleotide"
uucuuggccgacuuuccagtt

SEQ ID NO: 2147 - DNA, 21 bp, Artificial Sequence
  source: /note="Description of Artificial Sequence: Synthetic oligonucleotide"
  source: /note="Description of Combined DNA/RNA Molecule: Synthetic oligonucleotide"
cuuucuuggccgacuuucctt

SEQ ID NO: 2148 - DNA, 21 bp, Artificial Sequence
  source: /note="Description of Artificial Sequence: Synthetic oligonucleotide"
  source: /note="Description of Combined DNA/RNA Molecule: Synthetic oligonucleotide"
uuugucuuucuuggccgactt

SEQ ID NO: 2149 - DNA, 21 bp, Artificial Sequence
  source: /note="Description of Artificial Sequence: Synthetic oligonucleotide"
  source: /note="Description of Combined DNA/RNA Molecule: Synthetic oligonucleotide"
ucuuugucuuucuuggccgtt

SEQ ID NO: 2150 - DNA, 21 bp, Artificial Sequence
  source: /note="Description of Artificial Sequence: Synthetic oligonucleotide"
  source: /note="Description of Combined DNA/RNA Molecule: Synthetic oligonucleotide"
ugggucuuugucuuucuugtt

SEQ ID NO: 2151 - DNA, 21 bp, Artificial Sequence
  source: /note="Description of Artificial Sequence: Synthetic oligonucleotide"
  source: /note="Description of Combined DNA/RNA Molecule: Synthetic oligonucleotide"
uuguucacugggucuuugutt

SEQ ID NO: 2152 - DNA, 21 bp, Artificial Sequence
  source: /note="Description of Artificial Sequence: Synthetic oligonucleotide"
  source: /note="Description of Combined DNA/RNA Molecule: Synthetic oligonucleotide"
uuuguucacugggucuuugtt

SEQ ID NO: 2153 - DNA, 21 bp, Artificial Sequence
  source: /note="Description of Artificial Sequence: Synthetic oligonucleotide"
  source: /note="Description of Combined DNA/RNA Molecule: Synthetic oligonucleotide"
cggauuuguucacuggguctt

SEQ ID NO: 2154 - DNA, 21 bp, Artificial Sequence
  source: /note="Description of Artificial Sequence: Synthetic oligonucleotide"
  source: /note="Description of Combined DNA/RNA Molecule: Synthetic oligonucleotide"
gcccccggauuuguucacutt

SEQ ID NO: 2155 - DNA, 21 bp, Artificial Sequence
  source: /note="Description of Artificial Sequence: Synthetic oligonucleotide"
  source: /note="Description of Combined DNA/RNA Molecule: Synthetic oligonucleotide"
uugcccccggauuuguucatt

SEQ ID NO: 2156 - DNA, 21 bp, Artificial Sequence
  source: /note="Description of Artificial Sequence: Synthetic oligonucleotide"
  source: /note="Description of Combined DNA/RNA Molecule: Synthetic oligonucleotide"
gccuugcccccggauuugutt

SEQ ID NO: 2157 - DNA, 21 bp, Artificial Sequence
  source: /note="Description of Artificial Sequence: Synthetic oligonucleotide"
  source: /note="Description of Combined DNA/RNA Molecule: Synthetic oligonucleotide"
uuuuuggccuugcccccggtt

SEQ ID NO: 2158 - DNA, 21 bp, Artificial Sequence
  source: /note="Description of Artificial Sequence: Synthetic oligonucleotide"
  source: /note="Description of Combined DNA/RNA Molecule: Synthetic oligonucleotide"
cuucuuuuuggccuugccctt

SEQ ID NO: 2159 - DNA, 21 bp, Artificial Sequence
  source: /note="Description of Artificial Sequence: Synthetic oligonucleotide"
  source: /note="Description of Combined DNA/RNA Molecule: Synthetic oligonucleotide"
uucuucuuuuuggccuugctt

SEQ ID NO: 2160 - DNA, 21 bp, Artificial Sequence
  source: /note="Description of Artificial Sequence: Synthetic oligonucleotide"
  source: /note="Description of Combined DNA/RNA Molecule: Synthetic oligonucleotide"
ccacuucuucuuuuuggcctt

SEQ ID NO: 2161 - DNA, 21 bp, Artificial Sequence
  source: /note="Description of Artificial Sequence: Synthetic oligonucleotide"
  source: /note="Description of Combined DNA/RNA Molecule: Synthetic oligonucleotide"
gaccacuucuucuuuuuggtt

SEQ ID NO: 2162 - DNA, 21 bp, Artificial Sequence
  source: /note="Description of Artificial Sequence: Synthetic oligonucleotide"
  source: /note="Description of Combined DNA/RNA Molecule: Synthetic oligonucleotide"
uuggaccacuucuucuuuutt

SEQ ID NO: 2163 - DNA, 21 bp, Artificial Sequence
  source: /note="Description of Artificial Sequence: Synthetic oligonucleotide"
  source: /note="Description of Combined DNA/RNA Molecule: Synthetic oligonucleotide"
ccuuuggaccacuucuucutt

SEQ ID NO: 2164 - DNA, 21 bp, Artificial Sequence
  source: /note="Description of Artificial Sequence: Synthetic oligonucleotide"
  source: /note="Description of Combined DNA/RNA Molecule: Synthetic oligonucleotide"
cgaacuuugccuuuggacctt

SEQ ID NO: 2165 - DNA, 21 bp, Artificial Sequence
  source: /note="Description of Artificial Sequence: Synthetic oligonucleotide"
  source: /note="Description of Combined DNA/RNA Molecule: Synthetic oligonucleotide"
cccgaacuuugccuuuggatt

SEQ ID NO: 2166 - DNA, 21 bp, Artificial Sequence
  source: /note="Description of Artificial Sequence: Synthetic oligonucleotide"
  source: /note="Description of Combined DNA/RNA Molecule: Synthetic oligonucleotide"
uugucccgaacuuugccuutt

SEQ ID NO: 2167 - DNA, 21 bp, Artificial Sequence
  source: /note="Description of Artificial Sequence: Synthetic oligonucleotide"
  source: /note="Description of Combined DNA/RNA Molecule: Synthetic oligonucleotide"
gagcuugucccgaacuuugtt

SEQ ID NO: 2168 - DNA, 21 bp, Artificial Sequence
  source: /note="Description of Artificial Sequence: Synthetic oligonucleotide"
  source: /note="Description of Combined DNA/RNA Molecule: Synthetic oligonucleotide"
uuauugagcuugucccgaatt

SEQ ID NO: 2169 - DNA, 21 bp, Artificial Sequence
  source: /note="Description of Artificial Sequence: Synthetic oligonucleotide"
  source: /note="Description of Combined DNA/RNA Molecule: Synthetic oligonucleotide"
uaaguuauugagcuugucctt

SEQ ID NO: 2170 - DNA, 21 bp, Artificial Sequence
  source: /note="Description of Artificial Sequence: Synthetic oligonucleotide"
  source: /note="Description of Combined DNA/RNA Molecule: Synthetic oligonucleotide"
caagacuaaguuauugagctt

SEQ ID NO: 2171 - DNA, 21 bp, Artificial Sequence
  source: /note="Description of Artificial Sequence: Synthetic oligonucleotide"
  source: /note="Description of Combined DNA/RNA Molecule: Synthetic oligonucleotide"
caaacaagacuaaguuauutt

SEQ ID NO: 2172 - DNA, 21 bp, Artificial Sequence
  source: /note="Description of Artificial Sequence: Synthetic oligonucleotide"
  source: /note="Description of Combined DNA/RNA Molecule: Synthetic oligonucleotide"
uuugucaaacaagacuaagtt

SEQ ID NO: 2173 - DNA, 21 bp, Artificial Sequence
  source: /note="Description of Artificial Sequence: Synthetic oligonucleotide"
  source: /note="Description of Combined DNA/RNA Molecule: Synthetic oligonucleotide"
gguagcuuugucaaacaagtt

SEQ ID NO: 2174 - DNA, 21 bp, Artificial Sequence
  source: /note="Description of Artificial Sequence: Synthetic oligonucleotide"
  source: /note="Description of Combined DNA/RNA Molecule: Synthetic oligonucleotide"
uuuaucauagguagcuuugtt

SEQ ID NO: 2175 - DNA, 21 bp, Artificial Sequence
  source: /note="Description of Artificial Sequence: Synthetic oligonucleotide"
  source: /note="Description of Combined DNA/RNA Molecule: Synthetic oligonucleotide"
cagaguuuaucauagguagtt

SEQ ID NO: 2176 - DNA, 21 bp, Artificial Sequence
  source: /note="Description of Artificial Sequence: Synthetic oligonucleotide"
  source: /note="Description of Combined DNA/RNA Molecule: Synthetic oligonucleotide"
uuacagaguuuaucauaggtt

SEQ ID NO: 2177 - DNA, 21 bp, Artificial Sequence
  source: /note="Description of Artificial Sequence: Synthetic oligonucleotide"
  source: /note="Description of Combined DNA/RNA Molecule: Synthetic oligonucleotide"
uuccuuacagaguuuaucatt

SEQ ID NO: 2178 - DNA, 21 bp, Artificial Sequence
  source: /note="Description of Artificial Sequence: Synthetic oligonucleotide"
  source: /note="Description of Combined DNA/RNA Molecule: Synthetic oligonucleotide"
ggaacuuccuuacagaguutt

SEQ ID NO: 2179 - DNA, 21 bp, Artificial Sequence
  source: /note="Description of Artificial Sequence: Synthetic oligonucleotide"
  source: /note="Description of Combined DNA/RNA Molecule: Synthetic oligonucleotide"
ugggaacuuccuuacagagtt

SEQ ID NO: 2180 - DNA, 21 bp, Artificial Sequence
  source: /note="Description of Artificial Sequence: Synthetic oligonucleotide"
  source: /note="Description of Combined DNA/RNA Molecule: Synthetic oligonucleotide"
uuuauaguugggaacuucctt

SEQ ID NO: 2181 - DNA, 21 bp, Artificial Sequence
  source: /note="Description of Artificial Sequence: Synthetic oligonucleotide"
  source: /note="Description of Combined DNA/RNA Molecule: Synthetic oligonucleotide"
uaaguuuauaguugggaactt

SEQ ID NO: 2182 - DNA, 21 bp, Artificial Sequence
  source: /note="Description of Artificial Sequence: Synthetic oligonucleotide"
  source: /note="Description of Combined DNA/RNA Molecule: Synthetic oligonucleotide"
uauaaguuuauaguugggatt

SEQ ID NO: 2183 - DNA, 21 bp, Artificial Sequence
  source: /note="Description of Artificial Sequence: Synthetic oligonucleotide"
  source: /note="Description of Combined DNA/RNA Molecule: Synthetic oligonucleotide"
gguuauaaguuuauaguugtt

SEQ ID NO: 2184 - DNA, 21 bp, Artificial Sequence
  source: /note="Description of Artificial Sequence: Synthetic oligonucleotide"
  source: /note="Description of Combined DNA/RNA Molecule: Synthetic oligonucleotide"
agcugggguuauaaguuuatt

SEQ ID NO: 2185 - DNA, 21 bp, Artificial Sequence
  source: /note="Description of Artificial Sequence: Synthetic oligonucleotide"
  source: /note="Description of Combined DNA/RNA Molecule: Synthetic oligonucleotide"
cagcugggguuauaaguuutt

SEQ ID NO: 2186 - DNA, 21 bp, Artificial Sequence
  source: /note="Description of Artificial Sequence: Synthetic oligonucleotide"
  source: /note="Description of Combined DNA/RNA Molecule: Synthetic oligonucleotide"
ccacagcugggguuauaagtt

SEQ ID NO: 2187 - DNA, 21 bp, Artificial Sequence
  source: /note="Description of Artificial Sequence: Synthetic oligonucleotide"
  source: /note="Description of Combined DNA/RNA Molecule: Synthetic oligonucleotide"
cagagaccacagcuggggutt

SEQ ID NO: 2188 - DNA, 21 bp, Artificial Sequence
  source: /note="Description of Artificial Sequence: Synthetic oligonucleotide"
  source: /note="Description of Combined DNA/RNA Molecule: Synthetic oligonucleotide"
ucucagagaccacagcuggtt

SEQ ID NO: 2189 - DNA, 21 bp, Artificial Sequence
  source: /note="Description of Artificial Sequence: Synthetic oligonucleotide"
  source: /note="Description of Combined DNA/RNA Molecule: Synthetic oligonucleotide"
uucagucucucagagaccatt

SEQ ID NO: 2190 - DNA, 21 bp, Artificial Sequence
  source: /note="Description of Artificial Sequence: Synthetic oligonucleotide"
  source: /note="Description of Combined DNA/RNA Molecule: Synthetic oligonucleotide"
gaaucuucagucucucagatt

SEQ ID NO: 2191 - DNA, 21 bp, Artificial Sequence
  source: /note="Description of Artificial Sequence: Synthetic oligonucleotide"
  source: /note="Description of Combined DNA/RNA Molecule: Synthetic oligonucleotide"
cucgaaucuucagucucuctt

SEQ ID NO: 2192 - DNA, 21 bp, Artificial Sequence
  source: /note="Description of Artificial Sequence: Synthetic oligonucleotide"
  source: /note="Description of Combined DNA/RNA Molecule: Synthetic oligonucleotide"
ggagccucgaaucuucagutt

SEQ ID NO: 2193 - DNA, 21 bp, Artificial Sequence
  source: /note="Description of Artificial Sequence: Synthetic oligonucleotide"
  source: /note="Description of Combined DNA/RNA Molecule: Synthetic oligonucleotide"
ggccagggagccucgaauctt

SEQ ID NO: 2194 - DNA, 21 bp, Artificial Sequence
  source: /note="Description of Artificial Sequence: Synthetic oligonucleotide"
  source: /note="Description of Combined DNA/RNA Molecule: Synthetic oligonucleotide"
gcccuggccagggagccuctt

SEQ ID NO: 2195 - DNA, 21 bp, Artificial Sequence
  source: /note="Description of Artificial Sequence: Synthetic oligonucleotide"
  source: /note="Description of Combined DNA/RNA Molecule: Synthetic oligonucleotide"
ggcugcccuggccagggagtt

SEQ ID NO: 2196 - DNA, 21 bp, Artificial Sequence
  source: /note="Description of Artificial Sequence: Synthetic oligonucleotide"
  source: /note="Description of Combined DNA/RNA Molecule: Synthetic oligonucleotide"
gaagggcugcccuggccagtt

SEQ ID NO: 2197 - DNA, 21 bp, Artificial Sequence
  source: /note="Description of Artificial Sequence: Synthetic oligonucleotide"
  source: /note="Description of Combined DNA/RNA Molecule: Synthetic oligonucleotide"
cugaagggcugcccuggcctt

SEQ ID NO: 2198 - DNA, 21 bp, Artificial Sequence
  source: /note="Description of Artificial Sequence: Synthetic oligonucleotide"
  source: /note="Description of Combined DNA/RNA Molecule: Synthetic oligonucleotide"
uaaggagcuccugaagggctt

SEQ ID NO: 2199 - DNA, 21 bp, Artificial Sequence
  source: /note="Description of Artificial Sequence: Synthetic oligonucleotide"
  source: /note="Description of Combined DNA/RNA Molecule: Synthetic oligonucleotide"
uuuacuaaggagcuccugatt

SEQ ID NO: 2200 - DNA, 21 bp, Artificial Sequence
  source: /note="Description of Artificial Sequence: Synthetic oligonucleotide"
  source: /note="Description of Combined DNA/RNA Molecule: Synthetic oligonucleotide"
uccuuuacuaaggagcucctt

SEQ ID NO: 2201 - DNA, 21 bp, Artificial Sequence
  source: /note="Description of Artificial Sequence: Synthetic oligonucleotide"
  source: /note="Description of Combined DNA/RNA Molecule: Synthetic oligonucleotide"
uaaguccuuuacuaaggagtt

SEQ ID NO: 2202 - DNA, 21 bp, Artificial Sequence
  source: /note="Description of Artificial Sequence: Synthetic oligonucleotide"
  source: /note="Description of Combined DNA/RNA Molecule: Synthetic oligonucleotide"
ugauaaguccuuuacuaagtt

SEQ ID NO: 2203 - DNA, 21 bp, Artificial Sequence
  source: /note="Description of Artificial Sequence: Synthetic oligonucleotide"
  source: /note="Description of Combined DNA/RNA Molecule: Synthetic oligonucleotide"
uuugauaaguccuuuacuatt

SEQ ID NO: 2204 - DNA, 21 bp, Artificial Sequence
  source: /note="Description of Artificial Sequence: Synthetic oligonucleotide"
  source: /note="Description of Combined DNA/RNA Molecule: Synthetic oligonucleotide"
gaaaccaguuugauaaguctt

SEQ ID NO: 2205 - DNA, 21 bp, Artificial Sequence
  source: /note="Description of Artificial Sequence: Synthetic oligonucleotide"
  source: /note="Description of Combined DNA/RNA Molecule: Synthetic oligonucleotide"
uugaaaccaguuugauaagtt

SEQ ID NO: 2206 - DNA, 21 bp, Artificial Sequence
  source: /note="Description of Artificial Sequence: Synthetic oligonucleotide"
  source: /note="Description of Combined DNA/RNA Molecule: Synthetic oligonucleotide"
gcuuugaaaccaguuugautt

SEQ ID NO: 2207 - DNA, 21 bp, Artificial Sequence
  source: /note="Description of Artificial Sequence: Synthetic oligonucleotide"
  source: /note="Description of Combined DNA/RNA Molecule: Synthetic oligonucleotide"
ucugugcuuugaaaccagutt

SEQ ID NO: 2208 - DNA, 21 bp, Artificial Sequence
  source: /note="Description of Artificial Sequence: Synthetic oligonucleotide"
  source: /note="Description of Combined DNA/RNA Molecule: Synthetic oligonucleotide"
ugagcucugugcuuugaaatt

SEQ ID NO: 2209 - DNA, 21 bp, Artificial Sequence
  source: /note="Description of Artificial Sequence: Synthetic oligonucleotide"
  source: /note="Description of Combined DNA/RNA Molecule: Synthetic oligonucleotide"
uugagcucugugcuuugaatt

SEQ ID NO: 2210 - DNA, 21 bp, Artificial Sequence
  source: /note="Description of Artificial Sequence: Synthetic oligonucleotide"
  source: /note="Description of Combined DNA/RNA Molecule: Synthetic oligonucleotide"
guaaauuacuugagcucugtt

SEQ ID NO: 2211 - DNA, 21 bp, Artificial Sequence
  source: /note="Description of Artificial Sequence: Synthetic oligonucleotide"
  source: /note="Description of Combined DNA/RNA Molecule: Synthetic oligonucleotide"
uguaaauuacuugagcucutt

SEQ ID NO: 2212 - DNA, 21 bp, Artificial Sequence
  source: /note="Description of Artificial Sequence: Synthetic oligonucleotide"
  source: /note="Description of Combined DNA/RNA Molecule: Synthetic oligonucleotide"
cugguguaaauuacuugagtt

SEQ ID NO: 2213 - DNA, 21 bp, Artificial Sequence
  source: /note="Description of Artificial Sequence: Synthetic oligonucleotide"
  source: /note="Description of Combined DNA/RNA Molecule: Synthetic oligonucleotide"
uauuucugguguaaauuactt

SEQ ID NO: 2214 - DNA, 21 bp, Artificial Sequence
  source: /note="Description of Artificial Sequence: Synthetic oligonucleotide"
  source: /note="Description of Combined DNA/RNA Molecule: Synthetic oligonucleotide"
guauuucugguguaaauuatt

SEQ ID NO: 2215 - DNA, 21 bp, Artificial Sequence
  source: /note="Description of Artificial Sequence: Synthetic oligonucleotide"
  source: /note="Description of Combined DNA/RNA Molecule: Synthetic oligonucleotide"
ccuugguauuucugguguatt

SEQ ID NO: 2216 - DNA, 21 bp, Artificial Sequence
  source: /note="Description of Artificial Sequence: Synthetic oligonucleotide"
  source: /note="Description of Combined DNA/RNA Molecule: Synthetic oligonucleotide"
cacccuugguauuucuggutt

SEQ ID NO: 2217 - DNA, 21 bp, Artificial Sequence
  source: /note="Description of Artificial Sequence: Synthetic oligonucleotide"
  source: /note="Description of Combined DNA/RNA Molecule: Synthetic oligonucleotide"
cuccacccuugguauuucutt

SEQ ID NO: 2218 - DNA, 21 bp, Artificial Sequence
  source: /note="Description of Artificial Sequence: Synthetic oligonucleotide"
  source: /note="Description of Combined DNA/RNA Molecule: Synthetic oligonucleotide"
caucuccacccuugguauutt

SEQ ID NO: 2219 - DNA, 21 bp, Artificial Sequence
  source: /note="Description of Artificial Sequence: Synthetic oligonucleotide"
  source: /note="Description of Combined DNA/RNA Molecule: Synthetic oligonucleotide"
cuggagcaucuccacccuutt

SEQ ID NO: 2220 - DNA, 21 bp, Artificial Sequence
  source: /note="Description of Artificial Sequence: Synthetic oligonucleotide"
  source: /note="Description of Combined DNA/RNA Molecule: Synthetic oligonucleotide"
cagcuggagcaucuccacctt

SEQ ID NO: 2221 - DNA, 21 bp, Artificial Sequence
  source: /note="Description of Artificial Sequence: Synthetic oligonucleotide"
  source: /note="Description of Combined DNA/RNA Molecule: Synthetic oligonucleotide"
uucaccagcagcuggagcatt

SEQ ID NO: 2222 - DNA, 21 bp, Artificial Sequence
  source: /note="Description of Artificial Sequence: Synthetic oligonucleotide"
  source: /note="Description of Combined DNA/RNA Molecule: Synthetic oligonucleotide"
cuucaccagcagcuggagctt

SEQ ID NO: 2223 - DNA, 21 bp, Artificial Sequence
  source: /note="Description of Artificial Sequence: Synthetic oligonucleotide"
  source: /note="Description of Combined DNA/RNA Molecule: Synthetic oligonucleotide"
ucaugcaucuucaccagcatt

SEQ ID NO: 2224 - DNA, 21 bp, Artificial Sequence
  source: /note="Description of Artificial Sequence: Synthetic oligonucleotide"
  source: /note="Description of Combined DNA/RNA Molecule: Synthetic oligonucleotide"
cuauucaugcaucuucacctt

SEQ ID NO: 2225 - DNA, 21 bp, Artificial Sequence
  source: /note="Description of Artificial Sequence: Synthetic oligonucleotide"
  source: /note="Description of Combined DNA/RNA Molecule: Synthetic oligonucleotide"
gaccuauucaugcaucuuctt

SEQ ID NO: 2226 - DNA, 21 bp, Artificial Sequence
  source: /note="Description of Artificial Sequence: Synthetic oligonucleotide"
  source: /note="Description of Combined DNA/RNA Molecule: Synthetic oligonucleotide"
guuggaccuauucaugcautt

SEQ ID NO: 2227 - DNA, 21 bp, Artificial Sequence
  source: /note="Description of Artificial Sequence: Synthetic oligonucleotide"
  source: /note="Description of Combined DNA/RNA Molecule: Synthetic oligonucleotide"
ugguuggaccuauucaugctt

SEQ ID NO: 2228 - DNA, 21 bp, Artificial Sequence
  source: /note="Description of Artificial Sequence: Synthetic oligonucleotide"
  source: /note="Description of Combined DNA/RNA Molecule: Synthetic oligonucleotide"
caaauguacagcugguuggtt

SEQ ID NO: 2229 - DNA, 21 bp, Artificial Sequence
  source: /note="Description of Artificial Sequence: Synthetic oligonucleotide"
  source: /note="Description of Combined DNA/RNA Molecule: Synthetic oligonucleotide"
uuuccaaauguacagcuggtt

SEQ ID NO: 2230 - DNA, 21 bp, Artificial Sequence
  source: /note="Description of Artificial Sequence: Synthetic oligonucleotide"
  source: /note="Description of Combined DNA/RNA Molecule: Synthetic oligonucleotide"
uuuauuuuuccaaauguactt

SEQ ID NO: 2231 - DNA, 21 bp, Artificial Sequence
  source: /note="Description of Artificial Sequence: Synthetic oligonucleotide"
  source: /note="Description of Combined DNA/RNA Molecule: Synthetic oligonucleotide"
guuuuauuuuuccaaaugutt

SEQ ID NO: 2232 - DNA, 21 bp, Artificial Sequence
  source: /note="Description of Artificial Sequence: Synthetic oligonucleotide"
  source: /note="Description of Combined DNA/RNA Molecule: Synthetic oligonucleotide"
aauaaaguuuuauuuuucctt

SEQ ID NO: 2233 - DNA, 21 bp, Artificial Sequence
  source: /note="Description of Artificial Sequence: Synthetic oligonucleotide"
  source: /note="Description of Combined DNA/RNA Molecule: Synthetic oligonucleotide"
uuuaauaaaguuuuauuuutt

SEQ ID NO: 2234 - RNA, 19 nt, Artificial Sequence
  source: /note="Description of Artificial Sequence: Synthetic oligonucleotide"
cccaacuauaaacuuauaa

SEQ ID NO: 2235 - RNA, 19 nt, Artificial Sequence
  source: /note="Description of Artificial Sequence: Synthetic oligonucleotide"
ccaacuauaaacuuauaac

SEQ ID NO: 2236 - RNA, 19 nt, Artificial Sequence
  source: /note="Description of Artificial Sequence: Synthetic oligonucleotide"
acuuaucaaacugguuuca

SEQ ID NO: 2237 - RNA, 19 nt, Artificial Sequence
  source: /note="Description of Artificial Sequence: Synthetic oligonucleotide"
uuaucaaacugguuucaaa

SEQ ID NO: 2238 - RNA, 19 nt, Artificial Sequence
  source: /note="Description of Artificial Sequence: Synthetic oligonucleotide"
uaucaaacugguuucaaag

SEQ ID NO: 2239 - RNA, 19 nt, Artificial Sequence
  source: /note="Description of Artificial Sequence: Synthetic oligonucleotide"
cuguacauuuggaaaaaua

SEQ ID NO: 2240 - RNA, 19 nt, Artificial Sequence
  source: /note="Description of Artificial Sequence: Synthetic oligonucleotide"
gacaagcucaauaacuuag

SEQ ID NO: 2241 - RNA, 19 nt, Artificial Sequence
  source: /note="Description of Artificial Sequence: Synthetic oligonucleotide"
gcucaaguaauuuacacca

SEQ ID NO: 2242 - RNA, 19 nt, Artificial Sequence
  source: /note="Description of Artificial Sequence: Synthetic oligonucleotide"
ucgggacaagcucaauaac

SEQ ID NO: 2243 - RNA, 19 nt, Artificial Sequence
  source: /note="Description of Artificial Sequence: Synthetic oligonucleotide"
aaguaauuuacaccagaaa

SEQ ID NO: 2244 - RNA, 19 nt, Artificial Sequence
  source: /note="Description of Artificial Sequence: Synthetic oligonucleotide"
uguacauuuggaaaaauaa

SEQ ID NO: 2245 - RNA, 19 nt, Artificial Sequence
  source: /note="Description of Artificial Sequence: Synthetic oligonucleotide"
ccuuaguaaaggacuuauc

SEQ ID NO: 2246 - RNA, 19 nt, Artificial Sequence
  source: /note="Description of Artificial Sequence: Synthetic oligonucleotide"
cagcuguacauuuggaaaa

SEQ ID NO: 2247 - RNA, 19 nt, Artificial Sequence
  source: /note="Description of Artificial Sequence: Synthetic oligonucleotide"
gucucugagagacugaaga

SEQ ID NO: 2248 - RNA, 19 nt, Artificial Sequence
  source: /note="Description of Artificial Sequence: Synthetic oligonucleotide"
gagcucaaguaauuuacac

SEQ ID NO: 2249 - RNA, 19 nt, Artificial Sequence
  source: /note="Description of Artificial Sequence: Synthetic oligonucleotide"
caagcucaauaacuuaguc

SEQ ID NO: 2250 - RNA, 19 nt, Artificial Sequence
  source: /note="Description of Artificial Sequence: Synthetic oligonucleotide"
cuaugauaaacucuguaag

SEQ ID NO: 2251 - RNA, 19 nt, Artificial Sequence
  source: /note="Description of Artificial Sequence: Synthetic oligonucleotide"
caaguaauuuacaccagaa

SEQ ID NO: 2252 - RNA, 19 nt, Artificial Sequence
  source: /note="Description of Artificial Sequence: Synthetic oligonucleotide"
agcuguacauuuggaaaaa

SEQ ID NO: 2253 - RNA, 19 nt, Artificial Sequence
  source: /note="Description of Artificial Sequence: Synthetic oligonucleotide"
ggugucugcugcuauucuc

SEQ ID NO: 2254 - RNA, 19 nt, Artificial Sequence
  source: /note="Description of Artificial Sequence: Synthetic oligonucleotide"
uggaaaaauaaaacuuuau

SEQ ID NO: 2255 - RNA, 19 nt, Artificial Sequence
  source: /note="Description of Artificial Sequence: Synthetic oligonucleotide"
ugguccaaaggcaaaguuc

SEQ ID NO: 2256 - RNA, 19 nt, Artificial Sequence
  source: /note="Description of Artificial Sequence: Synthetic oligonucleotide"
cugagagacugaagauucg

SEQ ID NO: 2257 - RNA, 19 nt, Artificial Sequence
  source: /note="Description of Artificial Sequence: Synthetic oligonucleotide"
acagagcucaaguaauuua

SEQ ID NO: 2258 - RNA, 19 nt, Artificial Sequence
  source: /note="Description of Artificial Sequence: Synthetic oligonucleotide"
acucuguaaggaaguuccc

SEQ ID NO: 2259 - RNA, 19 nt, Artificial Sequence
  source: /note="Description of Artificial Sequence: Synthetic oligonucleotide"
agcucaaguaauuuacacc

SEQ ID NO: 2260 - RNA, 19 nt, Artificial Sequence
  source: /note="Description of Artificial Sequence: Synthetic oligonucleotide"
accagcuguacauuuggaa

SEQ ID NO: 2261 - RNA, 19 nt, Artificial Sequence
  source: /note="Description of Artificial Sequence: Synthetic oligonucleotide"
augauaaacucuguaagga

SEQ ID NO: 2262 - RNA, 19 nt, Artificial Sequence
  source: /note="Description of Artificial Sequence: Synthetic oligonucleotide"
uuggaaaaauaaaacuuua

SEQ ID NO: 2263 - RNA, 19 nt, Artificial Sequence
  source: /note="Description of Artificial Sequence: Synthetic oligonucleotide"
ucuguaaggaaguucccaa

SEQ ID NO: 2264 - RNA, 19 nt, Artificial Sequence
  source: /note="Description of Artificial Sequence: Synthetic oligonucleotide"
uaugauaaacucuguaagg

SEQ ID NO: 2265 - RNA, 19 nt, Artificial Sequence
  source: /note="Description of Artificial Sequence: Synthetic oligonucleotide"
aggaaguucccaacuauaa

SEQ ID NO: 2266 - RNA, 19 nt, Artificial Sequence
  source: /note="Description of Artificial Sequence: Synthetic oligonucleotide"
ggucucugagagacugaag

SEQ ID NO: 2267 - RNA, 19 nt, Artificial Sequence
  source: /note="Description of Artificial Sequence: Synthetic oligonucleotide"
accuaugauaaacucugua

SEQ ID NO: 2268 - RNA, 19 nt, Artificial Sequence
  source: /note="Description of Artificial Sequence: Synthetic oligonucleotide"
uacauuuggaaaaauaaaa

SEQ ID NO: 2269 - RNA, 19 nt, Artificial Sequence
  source: /note="Description of Artificial Sequence: Synthetic oligonucleotide"
ucugcugcuauucuccgag

SEQ ID NO: 2270 - RNA, 19 nt, Artificial Sequence
  source: /note="Description of Artificial Sequence: Synthetic oligonucleotide"
gaaguucccaacuauaaac

SEQ ID NO: 2271 - RNA, 19 nt, Artificial Sequence
  source: /note="Description of Artificial Sequence: Synthetic oligonucleotide"
agcuaccuaugauaaacuc

SEQ ID NO: 2272 - RNA, 19 nt, Artificial Sequence
  source: /note="Description of Artificial Sequence: Synthetic oligonucleotide"
uuuacaccagaaauaccaa

SEQ ID NO: 2273 - RNA, 19 nt, Artificial Sequence
  source: /note="Description of Artificial Sequence: Synthetic oligonucleotide"
ucuuguuugacaaagcuac

SEQ ID NO: 2274 - RNA, 19 nt, Artificial Sequence
  source: /note="Description of Artificial Sequence: Synthetic oligonucleotide"
uucuccgagcuucgcaaug

SEQ ID NO: 2275 - RNA, 19 nt, Artificial Sequence
  source: /note="Description of Artificial Sequence: Synthetic oligonucleotide"
cuauaaacuuauaacccca

SEQ ID NO: 2276 - RNA, 19 nt, Artificial Sequence
  source: /note="Description of Artificial Sequence: Synthetic oligonucleotide"
ucaaguaauuuacaccaga

SEQ ID NO: 2277 - RNA, 19 nt, Artificial Sequence
  source: /note="Description of Artificial Sequence: Synthetic oligonucleotide"
guccaaaggcaaaguucgg

SEQ ID NO: 2278 - RNA, 19 nt, Artificial Sequence
  source: /note="Description of Artificial Sequence: Synthetic oligonucleotide"
auaaacuuauaaccccagc

SEQ ID NO: 2279 - RNA, 19 nt, Artificial Sequence
  source: /note="Description of Artificial Sequence: Synthetic oligonucleotide"
ugucugcugcuauucuccg

SEQ ID NO: 2280 - RNA, 19 nt, Artificial Sequence
  source: /note="Description of Artificial Sequence: Synthetic oligonucleotide"
aaagcuaccuaugauaaac

SEQ ID NO: 2281 - RNA, 19 nt, Artificial Sequence
  source: /note="Description of Artificial Sequence: Synthetic oligonucleotide"
ucaaacugguuucaaagca

SEQ ID NO: 2282 - RNA, 19 nt, Artificial Sequence
  source: /note="Description of Artificial Sequence: Synthetic oligonucleotide"
caaacugguuucaaagcac

SEQ ID NO: 2283 - RNA, 19 nt, Artificial Sequence
  source: /note="Description of Artificial Sequence: Synthetic oligonucleotide"
aguaaaggacuuaucaaac

SEQ ID NO: 2284 - RNA, 19 nt, Artificial Sequence
  source: /note="Description of Artificial Sequence: Synthetic oligonucleotide"
cugguuucaaagcacagag

SEQ ID NO: 2285 - RNA, 19 nt, Artificial Sequence
  source: /note="Description of Artificial Sequence: Synthetic oligonucleotide"
acuuagucuuguuugacaa

SEQ ID NO: 2286 - RNA, 19 nt, Artificial Sequence
  source: /note="Description of Artificial Sequence: Synthetic oligonucleotide"
guuucaaagcacagagcuc

SEQ ID NO: 2287 - RNA, 19 nt, Artificial Sequence
  source: /note="Description of Artificial Sequence: Synthetic oligonucleotide"
uuauaaguuuauaguuggg

SEQ ID NO: 2288 - RNA, 19 nt, Artificial Sequence
  source: /note="Description of Artificial Sequence: Synthetic oligonucleotide"
guuauaaguuuauaguugg

SEQ ID NO: 2289 - RNA, 19 nt, Artificial Sequence
  source: /note="Description of Artificial Sequence: Synthetic oligonucleotide"
ugaaaccaguuugauaagu

SEQ ID NO: 2290 - RNA, 19 nt, Artificial Sequence
  source: /note="Description of Artificial Sequence: Synthetic oligonucleotide"
uuugaaaccaguuugauaa

SEQ ID NO: 2291 - RNA, 19 nt, Artificial Sequence
  source: /note="Description of Artificial Sequence: Synthetic oligonucleotide"
cuuugaaaccaguuugaua

SEQ ID NO: 2292 - RNA, 19 nt, Artificial Sequence
  source: /note="Description of Artificial Sequence: Synthetic oligonucleotide"
uauuuuuccaaauguacag

SEQ ID NO: 2293 - RNA, 19 nt, Artificial Sequence
  source: /note="Description of Artificial Sequence: Synthetic oligonucleotide"
cuaaguuauugagcuuguc

SEQ ID NO: 2294 - RNA, 19 nt, Artificial Sequence
  source: /note="Description of Artificial Sequence: Synthetic oligonucleotide"
ugguguaaauuacuugagc

SEQ ID NO: 2295 - RNA, 19 nt, Artificial Sequence
  source: /note="Description of Artificial Sequence: Synthetic oligonucleotide"
guuauugagcuugucccga

SEQ ID NO: 2296 - RNA, 19 nt, Artificial Sequence
  source: /note="Description of Artificial Sequence: Synthetic oligonucleotide"
uuucugguguaaauuacuu

SEQ ID NO: 2297 - RNA, 19 nt, Artificial Sequence
  source: /note="Description of Artificial Sequence: Synthetic oligonucleotide"
uuauuuuuccaaauguaca

SEQ ID NO: 2298 - RNA, 19 nt, Artificial Sequence
  source: /note="Description of Artificial Sequence: Synthetic oligonucleotide"
gauaaguccuuuacuaagg

SEQ ID NO: 2299 - RNA, 19 nt, Artificial Sequence
  source: /note="Description of Artificial Sequence: Synthetic oligonucleotide"
uuuuccaaauguacagcug

SEQ ID NO: 2300 - RNA, 19 nt, Artificial Sequence
  source: /note="Description of Artificial Sequence: Synthetic oligonucleotide"
ucuucagucucucagagac

SEQ ID NO: 2301 - RNA, 19 nt, Artificial Sequence
  source: /note="Description of Artificial Sequence: Synthetic oligonucleotide"
guguaaauuacuugagcuc

SEQ ID NO: 2302 - RNA, 19 nt, Artificial Sequence
  source: /note="Description of Artificial Sequence: Synthetic oligonucleotide"
gacuaaguuauugagcuug

SEQ ID NO: 2303 - RNA, 19 nt, Artificial Sequence
  source: /note="Description of Artificial Sequence: Synthetic oligonucleotide"
cuuacagaguuuaucauag

SEQ ID NO: 2304 - RNA, 19 nt, Artificial Sequence
  source: /note="Description of Artificial Sequence: Synthetic oligonucleotide"
uucugguguaaauuacuug

SEQ ID NO: 2305 - RNA, 19 nt, Artificial Sequence
  source: /note="Description of Artificial Sequence: Synthetic oligonucleotide"
uuuuuccaaauguacagcu

SEQ ID NO: 2306 - RNA, 19 nt, Artificial Sequence
  source: /note="Description of Artificial Sequence: Synthetic oligonucleotide"
gagaauagcagcagacacc

SEQ ID NO: 2307 - RNA, 19 nt, Artificial Sequence
  source: /note="Description of Artificial Sequence: Synthetic oligonucleotide"
auaaaguuuuauuuuucca

SEQ ID NO: 2308 - RNA, 19 nt, Artificial Sequence
  source: /note="Description of Artificial Sequence: Synthetic oligonucleotide"
gaacuuugccuuuggacca

SEQ ID NO: 2309 - RNA, 19 nt, Artificial Sequence
  source: /note="Description of Artificial Sequence: Synthetic oligonucleotide"
cgaaucuucagucucucag

SEQ ID NO: 2310 - RNA, 19 nt, Artificial Sequence
  source: /note="Description of Artificial Sequence: Synthetic oligonucleotide"
uaaauuacuugagcucugu

SEQ ID NO: 2311 - RNA, 19 nt, Artificial Sequence
  source: /note="Description of Artificial Sequence: Synthetic oligonucleotide"
gggaacuuccuuacagagu

SEQ ID NO: 2312 - RNA, 19 nt, Artificial Sequence
  source: /note="Description of Artificial Sequence: Synthetic oligonucleotide"
gguguaaauuacuugagcu

SEQ ID NO: 2313 - RNA, 19 nt, Artificial Sequence
  source: /note="Description of Artificial Sequence: Synthetic oligonucleotide"
uuccaaauguacagcuggu

SEQ ID NO: 2314 - RNA, 19 nt, Artificial Sequence
  source: /note="Description of Artificial Sequence: Synthetic oligonucleotide"
uccuuacagaguuuaucau

SEQ ID NO: 2315 - RNA, 19 nt, Artificial Sequence
  source: /note="Description of Artificial Sequence: Synthetic oligonucleotide"
uaaaguuuuauuuuuccaa

SEQ ID NO: 2316 - RNA, 19 nt, Artificial Sequence
  source: /note="Description of Artificial Sequence: Synthetic oligonucleotide"
uugggaacuuccuuacaga

SEQ ID NO: 2317 - RNA, 19 nt, Artificial Sequence
  source: /note="Description of Artificial Sequence: Synthetic oligonucleotide"
ccuuacagaguuuaucaua

SEQ ID NO: 2318 - RNA, 19 nt, Artificial Sequence
  source: /note="Description of Artificial Sequence: Synthetic oligonucleotide"
uuauaguugggaacuuccu

SEQ ID NO: 2319 - RNA, 19 nt, Artificial Sequence
  source: /note="Description of Artificial Sequence: Synthetic oligonucleotide"
cuucagucucucagagacc

SEQ ID NO: 2320 - RNA, 19 nt, Artificial Sequence
  source: /note="Description of Artificial Sequence: Synthetic oligonucleotide"
uacagaguuuaucauaggu

SEQ ID NO: 2321 - RNA, 19 nt, Artificial Sequence
  source: /note="Description of Artificial Sequence: Synthetic oligonucleotide"
uuuuauuuuuccaaaugua

SEQ ID NO: 2322 - RNA, 19 nt, Artificial Sequence
  source: /note="Description of Artificial Sequence: Synthetic oligonucleotide"
cucggagaauagcagcaga

SEQ ID NO: 2323 - RNA, 19 nt, Artificial Sequence
  source: /note="Description of Artificial Sequence: Synthetic oligonucleotide"
guuuauaguugggaacuuc

SEQ ID NO: 2324 - RNA, 19 nt, Artificial Sequence
  source: /note="Description of Artificial Sequence: Synthetic oligonucleotide"
gaguuuaucauagguagcu

SEQ ID NO: 2325 - RNA, 19 nt, Artificial Sequence
  source: /note="Description of Artificial Sequence: Synthetic oligonucleotide"
uugguauuucugguguaaa

SEQ ID NO: 2326 - RNA, 19 nt, Artificial Sequence
  source: /note="Description of Artificial Sequence: Synthetic oligonucleotide"
guagcuuugucaaacaaga

SEQ ID NO: 2327 - RNA, 19 nt, Artificial Sequence
  source: /note="Description of Artificial Sequence: Synthetic oligonucleotide"
cauugcgaagcucggagaa

SEQ ID NO: 2328 - RNA, 19 nt, Artificial Sequence
  source: /note="Description of Artificial Sequence: Synthetic oligonucleotide"
ugggguuauaaguuuauag

SEQ ID NO: 2329 - RNA, 19 nt, Artificial Sequence
  source: /note="Description of Artificial Sequence: Synthetic oligonucleotide"
ucugguguaaauuacuuga

SEQ ID NO: 2330 - RNA, 19 nt, Artificial Sequence
  source: /note="Description of Artificial Sequence: Synthetic oligonucleotide"
ccgaacuuugccuuuggac

SEQ ID NO: 2331 - RNA, 19 nt, Artificial Sequence
  source: /note="Description of Artificial Sequence: Synthetic oligonucleotide"
gcugggguuauaaguuuau

SEQ ID NO: 2332 - RNA, 19 nt, Artificial Sequence
  source: /note="Description of Artificial Sequence: Synthetic oligonucleotide"
cggagaauagcagcagaca

SEQ ID NO: 2333 - RNA, 19 nt, Artificial Sequence
  source: /note="Description of Artificial Sequence: Synthetic oligonucleotide"
guuuaucauagguagcuuu

SEQ ID NO: 2334 - RNA, 19 nt, Artificial Sequence
  source: /note="Description of Artificial Sequence: Synthetic oligonucleotide"
ugcuuugaaaccaguuuga

SEQ ID NO: 2335 - RNA, 19 nt, Artificial Sequence
  source: /note="Description of Artificial Sequence: Synthetic oligonucleotide"
gugcuuugaaaccaguuug

SEQ ID NO: 2336 - RNA, 19 nt, Artificial Sequence
  source: /note="Description of Artificial Sequence: Synthetic oligonucleotide"
guuugauaaguccuuuacu

SEQ ID NO: 2337 - RNA, 19 nt, Artificial Sequence
  source: /note="Description of Artificial Sequence: Synthetic oligonucleotide"
cucugugcuuugaaaccag

SEQ ID NO: 2338 - RNA, 19 nt, Artificial Sequence
  source: /note="Description of Artificial Sequence: Synthetic oligonucleotide"
uugucaaacaagacuaagu

SEQ ID NO: 2339 - RNA, 19 nt, Artificial Sequence
  source: /note="Description of Artificial Sequence: Synthetic oligonucleotide"
gagcucugugcuuugaaac

SEQ ID NO: 2340 - DNA, 19 bp, Homo sapiens
cccaactataaacttataa

SEQ ID NO: 2341 - DNA, 19 bp, Homo sapiens
ttcccaactataaacttat

SEQ ID NO: 2342 - DNA, 19 bp, Homo sapiens
ccaactataaacttataac

SEQ ID NO: 2343 - DNA, 19 bp, Homo sapiens
agctcaataacttagtctt

SEQ ID NO: 2344 - DNA, 19 bp, Homo sapiens
acttatcaaactggtttca

SEQ ID NO: 2345 - DNA, 19 bp, Homo sapiens
ggacttatcaaactggttt

SEQ ID NO: 2346 - DNA, 19 bp, Homo sapiens
agttcccaactataaactt

SEQ ID NO: 2347 - DNA, 19 bp, Homo sapiens
ttatcaaactggtttcaaa

SEQ ID NO: 2348 - DNA, 19 bp, Homo sapiens
tatcaaactggtttcaaag

SEQ ID NO: 2349 - DNA, 19 bp, Homo sapiens
agtaatttacaccagaaat

SEQ ID NO: 2350 - DNA, 19 bp, Homo sapiens
ctgtacatttggaaaaata

SEQ ID NO: 2351 - DNA, 19 bp, Homo sapiens
gacaagctcaataacttag

SEQ ID NO: 2352 - DNA, 19 bp, Homo sapiens
gctcaagtaatttacacca

SEQ ID NO: 2353 - DNA, 19 bp, Homo sapiens
gctccttagtaaaggactt

SEQ ID NO: 2354 - DNA, 19 bp, Homo sapiens
tccttagtaaaggacttat

SEQ ID NO: 2355 - DNA, 19 bp, Homo sapiens
tcgggacaagctcaataac

SEQ ID NO: 2356 - DNA, 19 bp, Homo sapiens
aagtaatttacaccagaaa

SEQ ID NO: 2357 - DNA, 19 bp, Homo sapiens
tgtacatttggaaaaataa

SEQ ID NO: 2358 - DNA, 19 bp, Homo sapiens
ccttagtaaaggacttatc

SEQ ID NO: 2359 - DNA, 19 bp, Homo sapiens
cagctgtacatttggaaaa

SEQ ID NO: 2360 - DNA, 19 bp, Homo sapiens
gtctctgagagactgaaga

SEQ ID NO: 2361 - DNA, 19 bp, Homo sapiens
gagctcaagtaatttacac

SEQ ID NO: 2362 - DNA, 19 bp, Homo sapiens
caagctcaataacttagtc

SEQ ID NO: 2363 - DNA, 19 bp, Homo sapiens
ctatgataaactctgtaag

SEQ ID NO: 2364 - DNA, 19 bp, Homo sapiens
caagtaatttacaccagaa

SEQ ID NO: 2365 - DNA, 19 bp, Homo sapiens
agctgtacatttggaaaaa

SEQ ID NO: 2366 - DNA, 19 bp, Homo sapiens
cgggacaagctcaataact

SEQ ID NO: 2367 - DNA, 19 bp, Homo sapiens
tcaataacttagtcttgtt

SEQ ID NO: 2368 - DNA, 19 bp, Homo sapiens
ggtgtctgctgctattctc

SEQ ID NO: 2369 - DNA, 19 bp, Homo sapiens
aggacttatcaaactggtt

SEQ ID NO: 2370 - DNA, 19 bp, Homo sapiens
tacctatgataaactctgt

SEQ ID NO: 2371 - DNA, 19 bp, Homo sapiens
tggaaaaataaaactttat

SEQ ID NO: 2372 - DNA, 19 bp, Homo sapiens
tggtccaaaggcaaagttc

SEQ ID NO: 2373 - DNA, 19 bp, Homo sapiens
ctgagagactgaagattcg

SEQ ID NO: 2374 - DNA, 19 bp, Homo sapiens
caataacttagtcttgttt

SEQ ID NO: 2375 - DNA, 19 bp, Homo sapiens
acagagctcaagtaattta

SEQ ID NO: 2376 - DNA, 19 bp, Homo sapiens
actctgtaaggaagttccc

SEQ ID NO: 2377 - DNA, 19 bp, Homo sapiens
cacagagctcaagtaattt

SEQ ID NO: 2378 - DNA, 19 bp, Homo sapiens
agctcaagtaatttacacc

SEQ ID NO: 2379 - DNA, 19 bp, Homo sapiens
accagctgtacatttggaa

SEQ ID NO: 2380 - DNA, 19 bp, Homo sapiens
atgataaactctgtaagga

SEQ ID NO: 2381 - DNA, 19 bp, Homo sapiens
ttggaaaaataaaacttta

SEQ ID NO: 2382 - DNA, 19 bp, Homo sapiens
acaagctcaataacttagt

SEQ ID NO: 2383 - DNA, 19 bp, Homo sapiens
tctctgagagactgaagat

SEQ ID NO: 2384 - DNA, 19 bp, Homo sapiens
tctgtaaggaagttcccaa

SEQ ID NO: 2385 - DNA, 19 bp, Homo sapiens
tatgataaactctgtaagg

SEQ ID NO: 2386 - DNA, 19 bp, Homo sapiens
aggaagttcccaactataa

SEQ ID NO: 2387 - DNA, 19 bp, Homo sapiens
ggtctctgagagactgaag

SEQ ID NO: 2388 - DNA, 19 bp, Homo sapiens
acctatgataaactctgta

SEQ ID NO: 2389 - DNA, 19 bp, Homo sapiens
aagctcaataacttagtct

SEQ ID NO: 2390 - DNA, 19 bp, Homo sapiens
tacatttggaaaaataaaa

SEQ ID NO: 2391 - DNA, 19 bp, Homo sapiens
tctgctgctattctccgag

SEQ ID NO: 2392 - DNA, 19 bp, Homo sapiens
gaagttcccaactataaac

SEQ ID NO: 2393 - DNA, 19 bp, Homo sapiens
agctacctatgataaactc

SEQ ID NO: 2394 - DNA, 19 bp, Homo sapiens
tttacaccagaaataccaa

SEQ ID NO: 2395 - DNA, 19 bp, Homo sapiens
tcttgtttgacaaagctac

SEQ ID NO: 2396 - DNA, 19 bp, Homo sapiens
ttctccgagcttcgcaatg

SEQ ID NO: 2397 - DNA, 19 bp, Homo sapiens
ctataaacttataacccca

SEQ ID NO: 2398 - DNA, 19 bp, Homo sapiens
tcaagtaatttacaccaga

SEQ ID NO: 2399 - DNA, 19 bp, Homo sapiens
gtccaaaggcaaagttcgg

SEQ ID NO: 2400 - DNA, 19 bp, Homo sapiens
ataaacttataaccccagc

SEQ ID NO: 2401 - DNA, 19 bp, Homo sapiens
tgtctgctgctattctccg

SEQ ID NO: 2402 - DNA, 19 bp, Homo sapiens
aagttcccaactataaact

SEQ ID NO: 2403 - DNA, 19 bp, Homo sapiens
agctccttagtaaaggact

SEQ ID NO: 2404 - DNA, 19 bp, Homo sapiens
aaagctacctatgataaac

SEQ ID NO: 2405 - DNA, 19 bp, Homo sapiens
tcaaactggtttcaaagca

SEQ ID NO: 2406 - DNA, 19 bp, Homo sapiens
caaactggtttcaaagcac

SEQ ID NO: 2407 - DNA, 19 bp, Homo sapiens
agtaaaggacttatcaaac

SEQ ID NO: 2408 - DNA, 19 bp, Homo sapiens
gtaaaggacttatcaaact

SEQ ID NO: 2409 - DNA, 19 bp, Homo sapiens
aagctacctatgataaact

SEQ ID NO: 2410 - DNA, 19 bp, Homo sapiens
ctggtttcaaagcacagag

SEQ ID NO: 2411 - DNA, 19 bp, Homo sapiens
acttagtcttgtttgacaa

SEQ ID NO: 2412 - DNA, 19 bp, Homo sapiens
gtttcaaagcacagagctc

SEQ ID NO: 2413 - DNA, 21 bp, Artificial Sequence
  source: /note="Description of Artificial Sequence: Synthetic oligonucleotide"
  source: /note="Description of Combined DNA/RNA Molecule: Synthetic oligonucleotide"
cccaacuauaaacuuauaatt

SEQ ID NO: 2414 - DNA, 21 bp, Artificial Sequence
  source: /note="Description of Artificial Sequence: Synthetic oligonucleotide"
  source: /note="Description of Combined DNA/RNA Molecule: Synthetic oligonucleotide"
ccaacuauaaacuuauaactt

SEQ ID NO: 2415 - DNA, 21 bp, Artificial Sequence
  source: /note="Description of Artificial Sequence: Synthetic oligonucleotide"
  source: /note="Description of Combined DNA/RNA Molecule: Synthetic oligonucleotide"
acuuaucaaacugguuucatt

SEQ ID NO: 2416 - DNA, 21 bp, Artificial Sequence
  source: /note="Description of Artificial Sequence: Synthetic oligonucleotide"
  source: /note="Description of Combined DNA/RNA Molecule: Synthetic oligonucleotide"
uuaucaaacugguuucaaatt

SEQ ID NO: 2417 - DNA, 21 bp, Artificial Sequence
  source: /note="Description of Artificial Sequence: Synthetic oligonucleotide"
  source: /note="Description of Combined DNA/RNA Molecule: Synthetic oligonucleotide"
uaucaaacugguuucaaagtt

SEQ ID NO: 2418 - DNA, 21 bp, Artificial Sequence
  source: /note="Description of Artificial Sequence: Synthetic oligonucleotide"
  source: /note="Description of Combined DNA/RNA Molecule: Synthetic oligonucleotide"
cuguacauuuggaaaaauatt

SEQ ID NO: 2419 - DNA, 21 bp, Artificial Sequence
  source: /note="Description of Artificial Sequence: Synthetic oligonucleotide"
  source: /note="Description of Combined DNA/RNA Molecule: Synthetic oligonucleotide"
gacaagcucaauaacuuagtt

SEQ ID NO: 2420 - DNA, 21 bp, Artificial Sequence
  source: /note="Description of Artificial Sequence: Synthetic oligonucleotide"
  source: /note="Description of Combined DNA/RNA Molecule: Synthetic oligonucleotide"
gcucaaguaauuuacaccatt

SEQ ID NO: 2421 - DNA, 21 bp, Artificial Sequence
  source: /note="Description of Artificial Sequence: Synthetic oligonucleotide"
  source: /note="Description of Combined DNA/RNA Molecule: Synthetic oligonucleotide"
ucgggacaagcucaauaactt

SEQ ID NO: 2422 - DNA, 21 bp, Artificial Sequence
  source: /note="Description of Artificial Sequence: Synthetic oligonucleotide"
  source: /note="Description of Combined DNA/RNA Molecule: Synthetic oligonucleotide"
aaguaauuuacaccagaaatt

SEQ ID NO: 2423 - DNA, 21 bp, Artificial Sequence
  source: /note="Description of Artificial Sequence: Synthetic oligonucleotide"
  source: /note="Description of Combined DNA/RNA Molecule: Synthetic oligonucleotide"
uguacauuuggaaaaauaatt

SEQ ID NO: 2424 - DNA, 21 bp, Artificial Sequence
  source: /note="Description of Artificial Sequence: Synthetic oligonucleotide"
  source: /note="Description of Combined DNA/RNA Molecule: Synthetic oligonucleotide"
ccuuaguaaaggacuuauctt

SEQ ID NO: 2425 - DNA, 21 bp, Artificial Sequence
  source: /note="Description of Artificial Sequence: Synthetic oligonucleotide"
  source: /note="Description of Combined DNA/RNA Molecule: Synthetic oligonucleotide"
cagcuguacauuuggaaaatt

SEQ ID NO: 2426 - DNA, 21 bp, Artificial Sequence
  source: /note="Description of Artificial Sequence: Synthetic oligonucleotide"
  source: /note="Description of Combined DNA/RNA Molecule: Synthetic oligonucleotide"
gucucugagagacugaagatt

SEQ ID NO: 2427 - DNA, 21 bp, Artificial Sequence
  source: /note="Description of Artificial Sequence: Synthetic oligonucleotide"
  source: /note="Description of Combined DNA/RNA Molecule: Synthetic oligonucleotide"
gagcucaaguaauuuacactt

SEQ ID NO: 2428 - DNA, 21 bp, Artificial Sequence
  source: /note="Description of Artificial Sequence: Synthetic oligonucleotide"
  source: /note="Description of Combined DNA/RNA Molecule: Synthetic oligonucleotide"
caagcucaauaacuuaguctt

SEQ ID NO: 2429 - DNA, 21 bp, Artificial Sequence
  source: /note="Description of Artificial Sequence: Synthetic oligonucleotide"
  source: /note="Description of Combined DNA/RNA Molecule: Synthetic oligonucleotide"
cuaugauaaacucuguaagtt

SEQ ID NO: 2430 - DNA, 21 bp, Artificial Sequence
  source: /note="Description of Artificial Sequence: Synthetic oligonucleotide"
  source: /note="Description of Combined DNA/RNA Molecule: Synthetic oligonucleotide"
caaguaauuuacaccagaatt

SEQ ID NO: 2431 - DNA, 21 bp, Artificial Sequence
  source: /note="Description of Artificial Sequence: Synthetic oligonucleotide"
  source: /note="Description of Combined DNA/RNA Molecule: Synthetic oligonucleotide"
agcuguacauuuggaaaaatt

SEQ ID NO: 2432 - DNA, 21 bp, Artificial Sequence
  source: /note="Description of Artificial Sequence: Synthetic oligonucleotide"
  source: /note="Description of Combined DNA/RNA Molecule: Synthetic oligonucleotide"
ggugucugcugcuauucuctt

SEQ ID NO: 2433 - DNA, 21 bp, Artificial Sequence
  source: /note="Description of Artificial Sequence: Synthetic oligonucleotide"
  source: /note="Description of Combined DNA/RNA Molecule: Synthetic oligonucleotide"
uggaaaaauaaaacuuuautt

SEQ ID NO: 2434 - DNA, 21 bp, Artificial Sequence
  source: /note="Description of Artificial Sequence: Synthetic oligonucleotide"
  source: /note="Description of Combined DNA/RNA Molecule: Synthetic oligonucleotide"
ugguccaaaggcaaaguuctt

SEQ ID NO: 2435 - DNA, 21 bp, Artificial Sequence
  source: /note="Description of Artificial Sequence: Synthetic oligonucleotide"
  source: /note="Description of Combined DNA/RNA Molecule: Synthetic oligonucleotide"
cugagagacugaagauucgtt

SEQ ID NO: 2436 - DNA, 21 bp, Artificial Sequence
  source: /note="Description of Artificial Sequence: Synthetic oligonucleotide"
  source: /note="Description of Combined DNA/RNA Molecule: Synthetic oligonucleotide"
acagagcucaaguaauuuatt

SEQ ID NO: 2437 - DNA, 21 bp, Artificial Sequence
  source: /note="Description of Artificial Sequence: Synthetic oligonucleotide"
  source: /note="Description of Combined DNA/RNA Molecule: Synthetic oligonucleotide"
acucuguaaggaaguuccctt

SEQ ID NO: 2438 - DNA, 21 bp, Artificial Sequence
  source: /note="Description of Artificial Sequence: Synthetic oligonucleotide"
  source: /note="Description of Combined DNA/RNA Molecule: Synthetic oligonucleotide"
agcucaaguaauuuacacctt

SEQ ID NO: 2439 - DNA, 21 bp, Artificial Sequence
  source: /note="Description of Artificial Sequence: Synthetic oligonucleotide"
  source: /note="Description of Combined DNA/RNA Molecule: Synthetic oligonucleotide"
accagcuguacauuuggaatt

SEQ ID NO: 2440 - DNA, 21 bp, Artificial Sequence
  source: /note="Description of Artificial Sequence: Synthetic oligonucleotide"
  source: /note="Description of Combined DNA/RNA Molecule: Synthetic oligonucleotide"
augauaaacucuguaaggatt

SEQ ID NO: 2441 - DNA, 21 bp, Artificial Sequence
  source: /note="Description of Artificial Sequence: Synthetic oligonucleotide"
  source: /note="Description of Combined DNA/RNA Molecule: Synthetic oligonucleotide"
uuggaaaaauaaaacuuuatt

SEQ ID NO: 2442 - DNA, 21 bp, Artificial Sequence
  source: /note="Description of Artificial Sequence: Synthetic oligonucleotide"
  source: /note="Description of Combined DNA/RNA Molecule: Synthetic oligonucleotide"
ucuguaaggaaguucccaatt

SEQ ID NO: 2443 - DNA, 21 bp, Artificial Sequence
  source: /note="Description of Artificial Sequence: Synthetic oligonucleotide"
  source: /note="Description of Combined DNA/RNA Molecule: Synthetic oligonucleotide"
uaugauaaacucuguaaggtt

SEQ ID NO: 2444 - DNA, 21 bp, Artificial Sequence
  source: /note="Description of Artificial Sequence: Synthetic oligonucleotide"
  source: /note="Description of Combined DNA/RNA Molecule: Synthetic oligonucleotide"
aggaaguucccaacuauaatt

SEQ ID NO: 2445 - DNA, 21 bp, Artificial Sequence
  source: /note="Description of Artificial Sequence: Synthetic oligonucleotide"
  source: /note="Description of Combined DNA/RNA Molecule: Synthetic oligonucleotide"
ggucucugagagacugaagtt

SEQ ID NO: 2446 - DNA, 21 bp, Artificial Sequence
  source: /note="Description of Artificial Sequence: Synthetic oligonucleotide"
  source: /note="Description of Combined DNA/RNA Molecule: Synthetic oligonucleotide"
accuaugauaaacucuguatt

SEQ ID NO: 2447 - DNA, 21 bp, Artificial Sequence
  source: /note="Description of Artificial Sequence: Synthetic oligonucleotide"
  source: /note="Description of Combined DNA/RNA Molecule: Synthetic oligonucleotide"
uacauuuggaaaaauaaaatt

SEQ ID NO: 2448 - DNA, 21 bp, Artificial Sequence
  source: /note="Description of Artificial Sequence: Synthetic oligonucleotide"
  source: /note="Description of Combined DNA/RNA Molecule: Synthetic oligonucleotide"
ucugcugcuauucuccgagtt

SEQ ID NO: 2449 - DNA, 21 bp, Artificial Sequence
  source: /note="Description of Artificial Sequence: Synthetic oligonucleotide"
  source: /note="Description of Combined DNA/RNA Molecule: Synthetic oligonucleotide"
gaaguucccaacuauaaactt

SEQ ID NO: 2450 - DNA, 21 bp, Artificial Sequence
  source: /note="Description of Artificial Sequence: Synthetic oligonucleotide"
  source: /note="Description of Combined DNA/RNA Molecule: Synthetic oligonucleotide"
agcuaccuaugauaaacuctt

SEQ ID NO: 2451 - DNA, 21 bp, Artificial Sequence
  source: /note="Description of Artificial Sequence: Synthetic oligonucleotide"
  source: /note="Description of Combined DNA/RNA Molecule: Synthetic oligonucleotide"
uuuacaccagaaauaccaatt

SEQ ID NO: 2452 - DNA, 21 bp, Artificial Sequence
  source: /note="Description of Artificial Sequence: Synthetic oligonucleotide"
  source: /note="Description of Combined DNA/RNA Molecule: Synthetic oligonucleotide"
ucuuguuugacaaagcuactt

SEQ ID NO: 2453 - DNA, 21 bp, Artificial Sequence
  source: /note="Description of Artificial Sequence: Synthetic oligonucleotide"
  source: /note="Description of Combined DNA/RNA Molecule: Synthetic oligonucleotide"
uucuccgagcuucgcaaugtt

SEQ ID NO: 2454 - DNA, 21 bp, Artificial Sequence
  source: /note="Description of Artificial Sequence: Synthetic oligonucleotide"
  source: /note="Description of Combined DNA/RNA Molecule: Synthetic oligonucleotide"
cuauaaacuuauaaccccatt

SEQ ID NO: 2455 - DNA, 21 bp, Artificial Sequence
  source: /note="Description of Artificial Sequence: Synthetic oligonucleotide"
  source: /note="Description of Combined DNA/RNA Molecule: Synthetic oligonucleotide"
ucaaguaauuuacaccagatt

SEQ ID NO: 2456 - DNA, 21 bp, Artificial Sequence
  source: /note="Description of Artificial Sequence: Synthetic oligonucleotide"
  source: /note="Description of Combined DNA/RNA Molecule: Synthetic oligonucleotide"
guccaaaggcaaaguucggtt

SEQ ID NO: 2457 - DNA, 21 bp, Artificial Sequence
  source: /note="Description of Artificial Sequence: Synthetic oligonucleotide"
  source: /note="Description of Combined DNA/RNA Molecule: Synthetic oligonucleotide"
auaaacuuauaaccccagctt

SEQ ID NO: 2458 - DNA, 21 bp, Artificial Sequence
  source: /note="Description of Artificial Sequence: Synthetic oligonucleotide"
  source: /note="Description of Combined DNA/RNA Molecule: Synthetic oligonucleotide"
ugucugcugcuauucuccgtt

SEQ ID NO: 2459 - DNA, 21 bp, Artificial Sequence
  source: /note="Description of Artificial Sequence: Synthetic oligonucleotide"
  source: /note="Description of Combined DNA/RNA Molecule: Synthetic oligonucleotide"
aaagcuaccuaugauaaactt

SEQ ID NO: 2460 - DNA, 21 bp, Artificial Sequence
  source: /note="Description of Artificial Sequence: Synthetic oligonucleotide"
  source: /note="Description of Combined DNA/RNA Molecule: Synthetic oligonucleotide"
ucaaacugguuucaaagcatt

SEQ ID NO: 2461 - DNA, 21 bp, Artificial Sequence
  source: /note="Description of Artificial Sequence: Synthetic oligonucleotide"
  source: /note="Description of Combined DNA/RNA Molecule: Synthetic oligonucleotide"
caaacugguuucaaagcactt

SEQ ID NO: 2462 - DNA, 21 bp, Artificial Sequence
  source: /note="Description of Artificial Sequence: Synthetic oligonucleotide"
  source: /note="Description of Combined DNA/RNA Molecule: Synthetic oligonucleotide"
aguaaaggacuuaucaaactt

SEQ ID NO: 2463 - DNA, 21 bp, Artificial Sequence
  source: /note="Description of Artificial Sequence: Synthetic oligonucleotide"
  source: /note="Description of Combined DNA/RNA Molecule: Synthetic oligonucleotide"
cugguuucaaagcacagagtt

SEQ ID NO: 2464 - DNA, 21 bp, Artificial Sequence
  source: /note="Description of Artificial Sequence: Synthetic oligonucleotide"
  source: /note="Description of Combined DNA/RNA Molecule: Synthetic oligonucleotide"
acuuagucuuguuugacaatt

SEQ ID NO: 2465 - DNA, 21 bp, Artificial Sequence
  source: /note="Description of Artificial Sequence: Synthetic oligonucleotide"
  source: /note="Description of Combined DNA/RNA Molecule: Synthetic oligonucleotide"
guuucaaagcacagagcuctt

SEQ ID NO: 2466 - DNA, 21 bp, Artificial Sequence
  source: /note="Description of Artificial Sequence: Synthetic oligonucleotide"
  source: /note="Description of Combined DNA/RNA Molecule: Synthetic oligonucleotide"
uuauaaguuuauaguugggtt

SEQ ID NO: 2467 - DNA, 21 bp, Artificial Sequence
  source: /note="Description of Artificial Sequence: Synthetic oligonucleotide"
  source: /note="Description of Combined DNA/RNA Molecule: Synthetic oligonucleotide"
guuauaaguuuauaguuggtt

SEQ ID NO: 2468 - DNA, 21 bp, Artificial Sequence
  source: /note="Description of Artificial Sequence: Synthetic oligonucleotide"
  source: /note="Description of Combined DNA/RNA Molecule: Synthetic oligonucleotide"
ugaaaccaguuugauaagutt

SEQ ID NO: 2469 - DNA, 21 bp, Artificial Sequence
  source: /note="Description of Artificial Sequence: Synthetic oligonucleotide"
  source: /note="Description of Combined DNA/RNA Molecule: Synthetic oligonucleotide"
uuugaaaccaguuugauaatt

SEQ ID NO: 2470 - DNA, 21 bp, Artificial Sequence
  source: /note="Description of Artificial Sequence: Synthetic oligonucleotide"
  source: /note="Description of Combined DNA/RNA Molecule: Synthetic oligonucleotide"
cuuugaaaccaguuugauatt

SEQ ID NO: 2471 - DNA, 21 bp, Artificial Sequence
  source: /note="Description of Artificial Sequence: Synthetic oligonucleotide"
  source: /note="Description of Combined DNA/RNA Molecule: Synthetic oligonucleotide"
uauuuuuccaaauguacagtt

SEQ ID NO: 2472 - DNA, 21 bp, Artificial Sequence
  source: /note="Description of Artificial Sequence: Synthetic oligonucleotide"
  source: /note="Description of Combined DNA/RNA Molecule: Synthetic oligonucleotide"
cuaaguuauugagcuuguctt

SEQ ID NO: 2473 - DNA, 21 bp, Artificial Sequence
  source: /note="Description of Artificial Sequence: Synthetic oligonucleotide"
  source: /note="Description of Combined DNA/RNA Molecule: Synthetic oligonucleotide"
ugguguaaauuacuugagctt

SEQ ID NO: 2474 - DNA, 21 bp, Artificial Sequence
  source: /note="Description of Artificial Sequence: Synthetic oligonucleotide"
  source: /note="Description of Combined DNA/RNA Molecule: Synthetic oligonucleotide"
guuauugagcuugucccgatt

SEQ ID NO: 2475 - DNA, 21 bp, Artificial Sequence
  source: /note="Description of Artificial Sequence: Synthetic oligonucleotide"
  source: /note="Description of Combined DNA/RNA Molecule: Synthetic oligonucleotide"
uuucugguguaaauuacuutt

SEQ ID NO: 2476 - DNA, 21 bp, Artificial Sequence
  source: /note="Description of Artificial Sequence: Synthetic oligonucleotide"
  source: /note="Description of Combined DNA/RNA Molecule: Synthetic oligonucleotide"
uuauuuuuccaaauguacatt

SEQ ID NO: 2477 - DNA, 21 bp, Artificial Sequence
  source: /note="Description of Artificial Sequence: Synthetic oligonucleotide"
  source: /note="Description of Combined DNA/RNA Molecule: Synthetic oligonucleotide"
gauaaguccuuuacuaaggtt

SEQ ID NO: 2478 - DNA, 21 bp, Artificial Sequence
  source: /note="Description of Artificial Sequence: Synthetic oligonucleotide"
  source: /note="Description of Combined DNA/RNA Molecule: Synthetic oligonucleotide"
uuuuccaaauguacagcugtt

SEQ ID NO: 2479 - DNA, 21 bp, Artificial Sequence
  source: /note="Description of Artificial Sequence: Synthetic oligonucleotide"
  source: /note="Description of Combined DNA/RNA Molecule: Synthetic oligonucleotide"
ucuucagucucucagagactt

SEQ ID NO: 2480 - DNA, 21 bp, Artificial Sequence
  source: /note="Description of Artificial Sequence: Synthetic oligonucleotide"
  source: /note="Description of Combined DNA/RNA Molecule: Synthetic oligonucleotide"
guguaaauuacuugagcuctt

SEQ ID NO: 2481 - DNA, 21 bp, Artificial Sequence
  source: /note="Description of Artificial Sequence: Synthetic oligonucleotide"
  source: /note="Description of Combined DNA/RNA Molecule: Synthetic oligonucleotide"
gacuaaguuauugagcuugtt

SEQ ID NO: 2482 - DNA, 21 bp, Artificial Sequence
  source: /note="Description of Artificial Sequence: Synthetic oligonucleotide"
  source: /note="Description of Combined DNA/RNA Molecule: Synthetic oligonucleotide"
cuuacagaguuuaucauagtt

SEQ ID NO: 2483 - DNA, 21 bp, Artificial Sequence
  source: /note="Description of Artificial Sequence: Synthetic oligonucleotide"
  source: /note="Description of Combined DNA/RNA Molecule: Synthetic oligonucleotide"
uucugguguaaauuacuugtt

SEQ ID NO: 2484 - DNA, 21 bp, Artificial Sequence
  source: /note="Description of Artificial Sequence: Synthetic oligonucleotide"
  source: /note="Description of Combined DNA/RNA Molecule: Synthetic oligonucleotide"
uuuuuccaaauguacagcutt

SEQ ID NO: 2485 - DNA, 21 bp, Artificial Sequence
  source: /note="Description of Artificial Sequence: Synthetic oligonucleotide"
  source: /note="Description of Combined DNA/RNA Molecule: Synthetic oligonucleotide"
gagaauagcagcagacacctt

SEQ ID NO: 2486 - DNA, 21 bp, Artificial Sequence
  source: /note="Description of Artificial Sequence: Synthetic oligonucleotide"
  source: /note="Description of Combined DNA/RNA Molecule: Synthetic oligonucleotide"
auaaaguuuuauuuuuccatt

SEQ ID NO: 2487 - DNA, 21 bp, Artificial Sequence
  source: /note="Description of Artificial Sequence: Synthetic oligonucleotide"
  source: /note="Description of Combined DNA/RNA Molecule: Synthetic oligonucleotide"
gaacuuugccuuuggaccatt

SEQ ID NO: 2488 - DNA, 21 bp, Artificial Sequence
  source: /note="Description of Artificial Sequence: Synthetic oligonucleotide"
  source: /note="Description of Combined DNA/RNA Molecule: Synthetic oligonucleotide"
cgaaucuucagucucucagtt

SEQ ID NO: 2489 - DNA, 21 bp, Artificial Sequence
  source: /note="Description of Artificial Sequence: Synthetic oligonucleotide"
  source: /note="Description of Combined DNA/RNA Molecule: Synthetic oligonucleotide"
uaaauuacuugagcucugutt

SEQ ID NO: 2490 - DNA, 21 bp, Artificial Sequence
  source: /note="Description of Artificial Sequence: Synthetic oligonucleotide"
  source: /note="Description of Combined DNA/RNA Molecule: Synthetic oligonucleotide"
gggaacuuccuuacagagutt

SEQ ID NO: 2491 - DNA, 21 bp, Artificial Sequence
  source: /note="Description of Artificial Sequence: Synthetic oligonucleotide"
  source: /note="Description of Combined DNA/RNA Molecule: Synthetic oligonucleotide"
gguguaaauuacuugagcutt

SEQ ID NO: 2492 - DNA, 21 bp, Artificial Sequence
  source: /note="Description of Artificial Sequence: Synthetic oligonucleotide"
  source: /note="Description of Combined DNA/RNA Molecule: Synthetic oligonucleotide"
uuccaaauguacagcuggutt

SEQ ID NO: 2493 - DNA, 21 bp, Artificial Sequence
  source: /note="Description of Artificial Sequence: Synthetic oligonucleotide"
  source: /note="Description of Combined DNA/RNA Molecule: Synthetic oligonucleotide"
uccuuacagaguuuaucautt

SEQ ID NO: 2494 - DNA, 21 bp, Artificial Sequence
  source: /note="Description of Artificial Sequence: Synthetic oligonucleotide"
  source: /note="Description of Combined DNA/RNA Molecule: Synthetic oligonucleotide"
uaaaguuuuauuuuuccaatt

SEQ ID NO: 2495 - DNA, 21 bp, Artificial Sequence
  source: /note="Description of Artificial Sequence: Synthetic oligonucleotide"
  source: /note="Description of Combined DNA/RNA Molecule: Synthetic oligonucleotide"
uugggaacuuccuuacagatt

SEQ ID NO: 2496 - DNA, 21 bp, Artificial Sequence
  source: /note="Description of Artificial Sequence: Synthetic oligonucleotide"
  source: /note="Description of Combined DNA/RNA Molecule: Synthetic oligonucleotide"
ccuuacagaguuuaucauatt

SEQ ID NO: 2497 - DNA, 21 bp, Artificial Sequence
  source: /note="Description of Artificial Sequence: Synthetic oligonucleotide"
  source: /note="Description of Combined DNA/RNA Molecule: Synthetic oligonucleotide"
uuauaguugggaacuuccutt

SEQ ID NO: 2498 - DNA, 21 bp, Artificial Sequence
  source: /note="Description of Artificial Sequence: Synthetic oligonucleotide"
  source: /note="Description of Combined DNA/RNA Molecule: Synthetic oligonucleotide"
cuucagucucucagagacctt

SEQ ID NO: 2499 - DNA, 21 bp, Artificial Sequence
  source: /note="Description of Artificial Sequence: Synthetic oligonucleotide"
  source: /note="Description of Combined DNA/RNA Molecule: Synthetic oligonucleotide"
uacagaguuuaucauaggutt

SEQ ID NO: 2500 - DNA, 21 bp, Artificial Sequence
  source: /note="Description of Artificial Sequence: Synthetic oligonucleotide"
  source: /note="Description of Combined DNA/RNA Molecule: Synthetic oligonucleotide"
uuuuauuuuuccaaauguatt

SEQ ID NO: 2501 - DNA, 21 bp, Artificial Sequence
  source: /note="Description of Artificial Sequence: Synthetic oligonucleotide"
  source: /note="Description of Combined DNA/RNA Molecule: Synthetic oligonucleotide"
cucggagaauagcagcagatt

SEQ ID NO: 2502 - DNA, 21 bp, Artificial Sequence
  source: /note="Description of Artificial Sequence: Synthetic oligonucleotide"
  source: /note="Description of Combined DNA/RNA Molecule: Synthetic oligonucleotide"
guuuauaguugggaacuuctt

SEQ ID NO: 2503 - DNA, 21 bp, Artificial Sequence
  source: /note="Description of Artificial Sequence: Synthetic oligonucleotide"
  source: /note="Description of Combined DNA/RNA Molecule: Synthetic oligonucleotide"
gaguuuaucauagguagcutt

SEQ ID NO: 2504 - DNA, 21 bp, Artificial Sequence
  source: /note="Description of Artificial Sequence: Synthetic oligonucleotide"
  source: /note="Description of Combined DNA/RNA Molecule: Synthetic oligonucleotide"
uugguauuucugguguaaatt

SEQ ID NO: 2505 - DNA, 21 bp, Artificial Sequence
  source: /note="Description of Artificial Sequence: Synthetic oligonucleotide"
  source: /note="Description of Combined DNA/RNA Molecule: Synthetic oligonucleotide"
guagcuuugucaaacaagatt

SEQ ID NO: 2506 - DNA, 21 bp, Artificial Sequence
  source: /note="Description of Artificial Sequence: Synthetic oligonucleotide"
  source: /note="Description of Combined DNA/RNA Molecule: Synthetic oligonucleotide"
cauugcgaagcucggagaatt

SEQ ID NO: 2507 - DNA, 21 bp, Artificial Sequence
  source: /note="Description of Artificial Sequence: Synthetic oligonucleotide"
  source: /note="Description of Combined DNA/RNA Molecule: Synthetic oligonucleotide"
ugggguuauaaguuuauagtt

SEQ ID NO: 2508 - DNA, 21 bp, Artificial Sequence
  source: /note="Description of Artificial Sequence: Synthetic oligonucleotide"
  source: /note="Description of Combined DNA/RNA Molecule: Synthetic oligonucleotide"
ucugguguaaauuacuugatt

SEQ ID NO: 2509 - DNA, 21 bp, Artificial Sequence
  source: /note="Description of Artificial Sequence: Synthetic oligonucleotide"
  source: /note="Description of Combined DNA/RNA Molecule: Synthetic oligonucleotide"
ccgaacuuugccuuuggactt

SEQ ID NO: 2510 - DNA, 21 bp, Artificial Sequence
  source: /note="Description of Artificial Sequence: Synthetic oligonucleotide"
  source: /note="Description of Combined DNA/RNA Molecule: Synthetic oligonucleotide"
gcugggguuauaaguuuautt

SEQ ID NO: 2511 - DNA, 21 bp, Artificial Sequence
  source: /note="Description of Artificial Sequence: Synthetic oligonucleotide"
  source: /note="Description of Combined DNA/RNA Molecule: Synthetic oligonucleotide"
cggagaauagcagcagacatt

SEQ ID NO: 2512 - DNA, 21 bp, Artificial Sequence
  source: /note="Description of Artificial Sequence: Synthetic oligonucleotide"
  source: /note="Description of Combined DNA/RNA Molecule: Synthetic oligonucleotide"
guuuaucauagguagcuuutt

SEQ ID NO: 2513 - DNA, 21 bp, Artificial Sequence
  source: /note="Description of Artificial Sequence: Synthetic oligonucleotide"
  source: /note="Description of Combined DNA/RNA Molecule: Synthetic oligonucleotide"
ugcuuugaaaccaguuugatt

SEQ ID NO: 2514 - DNA, 21 bp, Artificial Sequence
  source: /note="Description of Artificial Sequence: Synthetic oligonucleotide"
  source: /note="Description of Combined DNA/RNA Molecule: Synthetic oligonucleotide"
gugcuuugaaaccaguuugtt

SEQ ID NO: 2515 - DNA, 21 bp, Artificial Sequence
  source: /note="Description of Artificial Sequence: Synthetic oligonucleotide"
  source: /note="Description of Combined DNA/RNA Molecule: Synthetic oligonucleotide"
guuugauaaguccuuuacutt

SEQ ID NO: 2516 - DNA, 21 bp, Artificial Sequence
  source: /note="Description of Artificial Sequence: Synthetic oligonucleotide"
  source: /note="Description of Combined DNA/RNA Molecule: Synthetic oligonucleotide"
cucugugcuuugaaaccagtt

SEQ ID NO: 2517 - DNA, 21 bp, Artificial Sequence
  source: /note="Description of Artificial Sequence: Synthetic oligonucleotide"
  source: /note="Description of Combined DNA/RNA Molecule: Synthetic oligonucleotide"
uugucaaacaagacuaagutt

SEQ ID NO: 2518 - DNA, 21 bp, Artificial Sequence
  source: /note="Description of Artificial Sequence: Synthetic oligonucleotide"
  source: /note="Description of Combined DNA/RNA Molecule: Synthetic oligonucleotide"
gagcucugugcuuugaaactt

SEQ ID NO: 2519 - DNA, 4800 bp, Artificial Sequence
  source: /note="Description of Artificial Sequence: Synthetic polynucleotide"
ggggccggggccggggccggggccggggccggggccggggccggggccggggccggggccggggccggggccggggccggggccggggccggggccggggccggggccggggccggggccggggccggggccggggccggggccggggccggggccggggccggggccggggccggggccggggccggggccggggccggggccggggccggggccggggccggggccggggccggggccggggccggggccggggccggggccggggccggggccggggccggggccggggccggggccggggccggggccggggccggggccggggccggggccggggccggggccggggccggggccggggccggggccggggccggggccggggccggggccggggccggggccggggccggggccggggccggggccggggccggggccggggccggggccggggccggggccggggccggggccggggccggggccggggccggggccggggccggggccggggccggggccggggccggggccggggccggggccggggccggggccggggccggggccggggccggggccggggccggggccggggccggggccggggccggggccggggccggggccggggccggggccggggccggggccggggccggggccggggccggggccggggccggggccggggccggggccggggccggggccggggccggggccggggccggggccggggccggggccggggccggggccggggccggggccggggccggggccggggccggggccggggccggggccggggccggggccggggccggggccggggccggggccggggccggggccggggccggggccggggccggggccggggccggggccggggccggggccggggccggggccggggccggggccggggccggggccggggccggggccggggccggggccggggccggggccggggccggggccggggccggggccggggccggggccggggccggggccggggccggggccggggccggggccggggccggggccggggccggggccggggccggggccggggccggggccggggccggggccggggccggggccggggccggggccggggccggggccggggccggggccggggccggggccggggccggggccggggccggggccggggccggggccggggccggggccggggccggggccggggccggggccggggccggggccggggccggggccggggccggggccggggccggggccggggccggggccggggccggggccggggccggggccggggccggggccggggccggggccggggccggggccggggccggggccggggccggggccggggccggggccggggccggggccggggccggggccggggccggggccggggccggggccggggccggggccggggccggggccggggccggggccggggccggggccggggccggggccggggccggggccggggccggggccggggccggggccggggccggggccggggccggggccggggccggggccggggccggggccggggccggggccggggccggggccggggccggggccggggccggggccggggccggggccggggccggggccggggccggggccggggccggggccggggccggggccggggccggggccggggccggggccggggccggggccggggccggggccggggccggggccggggccggggccggggccggggccggggccggggccggggccggggccggggccggggccggggccggggccggggccggggccggggccggggccggggccggggccggggccggggccggggccggggccggggccggggccggggccggggccggggccggggccggggccggggccggggccggggccggggccggggccggggccggggccggggccggggccggggccggggccggggccggggccggggccggggccggggccggggccggggccggggccggggccggggccggggccggggccggggccggggccggggccggggccggggccggggccggggccggggccggggccggggccggggccggggccggggccggggccggggccggggccggggccggggccggggccggggccggggccggggccggggccggggccggggccggggccggggccggggccggggccggggccggggccggggccggggccggggccggggccggggccggggccggggccggggccggggccggggccggggccggggccggggccggggccggggccggggccggggccggggccggggccggggccggggccggggccggggccggggccggggccggggccggggccggggccggggccggggccggggccggggccggggccggggccggggccggggccggggccggggccggggccggggccggggccggggccggggccggggccggggccggggccggggccggggccggggccggggccggggccggggccggggccggggccggggccggggccggggccggggccggggccggggccggggccggggccggggccggggccggggccggggccggggccggggccggggccggggccggggccggggccggggccggggccggggccggggccggggccggggccggggccggggccggggccggggccggggccggggccggggccggggccggggccggggccggggccggggccggggccggggccggggccggggccggggccggggccggggccggggccggggccggggccggggccggggccggggccggggccggggccggggccggggccggggccggggccggggccggggccggggccggggccggggccggggccggggccggggccggggccggggccggggccggggccggggccggggccggggccggggccggggccggggccggggccggggccggggccggggccggggccggggccggggccggggccggggccggggccggggccggggccggggccggggccggggccggggccggggccggggccggggccggggccggggccggggccggggccggggccggggccggggccggggccggggccggggccggggccggggccggggccggggccggggccggggccggggccggggccggggccggggccggggccggggccggggccggggccggggccggggccggggccggggccggggccggggccggggccggggccggggccggggccggggccggggccggggccggggccggggccggggccggggccggggccggggccggggccggggccggggccggggccggggccggggccggggccggggccggggccggggccggggccggggccggggccggggccggggccggggccggggccggggccggggccggggccggggccggggccggggccggggccggggccggggccggggccggggccggggccggggccggggccggggccggggccggggccggggccggggccggggccggggccggggccggggccggggccggggccggggccggggccggggccggggccggggccggggccggggccggggccggggccggggccggggccggggccggggccggggccggggccggggccggggccggggccggggccggggccggggccggggccggggccggggccggggccggggccggggccggggccggggccggggccggggccggggccggggccggggccggggccggggccggggccggggccggggccggggccggggccggggccggggccggggccggggccggggccggggccggggccggggccggggccggggccggggccggggccggggccggggccggggccggggccggggccggggccggggccggggccggggccggggccggggccggggccggggccggggccggggccggggccggggccggggccggggccggggccggggccggggccggggccggggccggggccggggccggggccggggccggggccggggccggggccggggccggggccggggccggggccggggccggggccggggccggggccggggccggggccggggccggggccggggccggggccggggccggggccggggccggggccggggccggggccggggccggggccggggccggggccggggccggggccggggccggggccggggccggggccggggccggggccggggccggggccggggccggggccggggccggggccggggccggggccggggccggggccggggccggggccggggccggggccggggccggggccggggccggggccggggccggggccggggccggggccggggccggggccggggccggggccggggccggggccggggccggggccggggccggggccggggccggggccggggccggggccggggccggggccggggccggggccggggccggggccggggccggggccggggccggggccggggccggggccggggccggggccggggccggggccggggccggggccggggccggggccggggccggggccggggccggggccggggccggggccggggccggggccggggccggggccggggccggggccggggccggggccggggccggggccggggccggggccggggccggggcc

SEQ ID NO: 2520 - DNA, 19 bp, Homo sapiens
aggacgacaagaagaagaa

SEQ ID NO: 2521 - DNA, 19 bp, Homo sapiens
ggacgacaagaagaagaag

SEQ ID NO: 2522 - DNA, 19 bp, Homo sapiens
acaagaagaagaaggacgc

SEQ ID NO: 2523 - DNA, 19 bp, Homo sapiens
cggccaagaaagacaaaga

SEQ ID NO: 2524 - DNA, 19 bp, Homo sapiens
caagaaagacaaagaccca

SEQ ID NO: 2525 - DNA, 19 bp, Homo sapiens
ccgggggcaaggccaaaaa

SEQ ID NO: 2526 - DNA, 19 bp, Homo sapiens
gggcaaggccaaaaagaag

SEQ ID NO: 2527 - DNA, 19 bp, Homo sapiens
gcaaggccaaaaagaagaa

1. A double stranded ribonucleic acid (dsRNA) agent for inhibiting expression of RPS25, wherein the dsRNA agent comprises a sense strand and an antisense strand forming a double stranded region, wherein the sense strand comprises a nucleotide sequence comprising at least 15 contiguous nucleotides, with 0 or 1 mismatches, of a portion of the nucleotide sequence of SEQ ID NO: 1 and the antisense strand comprises a nucleotide sequence comprising at least 15 contiguous nucleotides, with 0 or 1 mismatches, of the corresponding portion of nucleotide sequence of SEQ ID NO: 2 such that the sense strand is complementary to the at least 15 contiguous nucleotides in the antisense strand.

2.-4. (canceled)

5. The dsRNA agent of claim 1, wherein the sense strand is a sense strand selected from the group consisting of any of the sense strands in any one of Tables 2-14 and/or the antisense strand is an antisense strand selected from the group consisting of any of the antisense strands in any one of Tables 2-14.

6. The dsRNA agent of claim 1, wherein the sense strand, the antisense strand, or both the sense strand and the antisense strand is conjugated to one or more lipophilic moieties.

7.-11. (canceled)

12. The dsRNA agent of claim 1, wherein the dsRNA agent comprises at least one modified nucleotide.

13. (canceled)

14. (canceled)

15. The dsRNA agent of claim 12 wherein at least one of the modified nucleotides is selected from the group a deoxy-nucleotide, a 3′-terminal deoxy-thymine (dT) nucleotide, a 2′-O-methyl modified nucleotide, a 2′-fluoro modified nucleotide, a 2′-deoxy-modified nucleotide, a locked nucleotide, an unlocked nucleotide, a conformationally restricted nucleotide, a constrained ethyl nucleotide, an abasic nucleotide, a 2′-amino-modified nucleotide, a 2′-O-allyl-modified nucleotide, 2′-C-alkyl-modified nucleotide, 2′-hydroxly-modified nucleotide, a 2′-methoxyethyl modified nucleotide, a 2′-O-alkyl-modified nucleotide, a morpholino nucleotide, a phosphoramidate, a non-natural base comprising nucleotide, a tetrahydropyran modified nucleotide, a 1,5-anhydrohexitol modified nucleotide, a cyclohexenyl modified nucleotide, a nucleotide comprising a 5′-phosphorothioate group, a nucleotide comprising a 5′-methylphosphonate group, a nucleotide comprising a 5′ phosphate or 5′ phosphate mimic, a nucleotide comprising vinyl phosphonate, a nucleotide comprising adenosine-glycol nucleic acid (GNA), a nucleotide comprising thymidine-glycol nucleic acid (GNA) S-Isomer, a nucleotide comprising 2-hydroxymethyl-tetrahydrofurane-5-phosphate, a nucleotide comprising 2′-deoxythymidine-3′ phosphate, a nucleotide comprising 2′-deoxyguanosine-3′-phosphate, and a terminal nucleotide linked to a cholesteryl derivative and a dodecanoic acid bisdecylamide group; and combinations thereof.

16.-18. (canceled)

19. The dsRNA agent of claim 15, further comprising at least one phosphorothioate internucleotide linkage.

20. (canceled)

21. (canceled)

22. The dsRNA agent of claim 1, wherein at least one strand comprises a 3′ overhang of at least 1 nucleotide.

23. (canceled)

24. The dsRNA agent of claim 1, wherein the double stranded region is 15-30 nucleotide pairs in length.

25.-29. (canceled)

30. The dsRNA agent of claim 1, wherein each strand is independently 19-30 nucleotides in length.

31. (canceled)

32. (canceled)

33. The dsRNA agent of claim 6, wherein one or more lipophilic moieties are conjugated to one or more internal positions on at least one strand.

34.-42. (canceled)

43. The dsRNA agent of claim 6, wherein the one or more lipophilic moieties are conjugated to one or more of the internal positions selected from the group consisting of positions 4-8 and 13-18 on the sense strand, and positions 6-10 and 15-18 on the antisense strand, counting from the 5′-end of each strand.

44. The dsRNA agent of claim 43, wherein the one or more lipophilic moieties are conjugated to one or more of the internal positions selected from the group consisting of positions 5, 6, 7, 15, and 17 on the sense strand, and positions 15 and 17 on the antisense strand, counting from the 5′-end of each strand.

45.-50. (canceled)

51. The dsRNA agent of claim 6, wherein the lipophilic moiety is an aliphatic, alicyclic, or polyalicyclic compound.

52. (canceled)

53. The dsRNA agent of claim 51, wherein the lipophilic moiety contains a saturated or unsaturated C4-C30 hydrocarbon chain, and an optional functional group selected from the group consisting of hydroxyl, amine, carboxylic acid, sulfonate, phosphate, thiol, azide, and alkyne.

54.-59. (canceled)

60. The double-stranded iRNA agent of claim 6, wherein the lipophilic moiety is conjugated to a nucleobase, sugar moiety, or internucleosidic linkage.

61.-69. (canceled)

70. The dsRNA agent of claim 1, further comprising a phosphate or phosphate mimic at the 5′-end of the antisense strand.

71.-73. (canceled)

74. An isolated cell containing the dsRNA agent of claim 1.

75. A pharmaceutical composition for inhibiting expression of a gene encoding RPS25, comprising the dsRNA agent of claim 1.

76. (canceled)

77. A method of inhibiting expression of an RPS25 gene in a cell, the method comprising:
(a) contacting the cell with the dsRNA agent of claim 1; and
(b) maintaining the cell produced in step (a) for a time sufficient to obtain degradation of the mRNA transcript of the RPS25 gene, thereby inhibiting expression of the RPS25 gene in the cell.

78.-83. (canceled)

84. A method of treating a subject diagnosed with an RPS25-associated disease, the method comprising administering to the subject a therapeutically effective amount of the dsRNA agent of claim 1, thereby treating the subject.

85. (canceled)

86. (canceled)

87. The method of claim 84, wherein the subject has been diagnosed with a nucleotide repeat expansion disease.

88. The method of claim 87, wherein the nucleotide repeat expansion disease is selected from the group consisting of C9orf72 ALS/FTD, Huntington-Like Syndrome Due To C9orf72 Expansions, Fragile X syndrome (FXS), Myotonic dystrophy, CAG/polyglutamine disease, Friedreich ataxia, Unverricht-Lundborg myoclonic epilepsy (EPM1), Oculopharyngeal muscular dystrophy (OPMD), and Fuchs endothelial corneal dystrophy (FECD).

89.-92. (canceled)

90. (canceled)

91. (canceled)

92. (canceled)

93. The method of claim 84, wherein the dsRNA agent is administered to the subject at a dose of about 0.01 mg/kg to about 50 mg/kg.

94. The method of claim 84, wherein the dsRNA agent is administered to the subject intrathecally.

95. (canceled)

96. (canceled)
